United States Patent Application Publication US 2026/0274955 A1, published September 17, 2026 (application 19/659,950).

The application's sequence listing, which the Patent Office published only in electronic form, follows.

SEQUENCE LISTING (1998 sequences)

SEQ ID NO: 1 - protein, 14 aa, synthetic construct
MDWCPRDLWVHCFA

SEQ ID NO: 2 - protein, 14 aa, synthetic construct
ADWCPRDLWVHCFA

SEQ ID NO: 3 - protein, 14 aa, synthetic construct
RDWCPRDLWVHCFA

SEQ ID NO: 4 - protein, 14 aa, synthetic construct
NDWCPRDLWVHCFA

SEQ ID NO: 5 - protein, 14 aa, synthetic construct
DDWCPRDLWVHCFA

SEQ ID NO: 6 - protein, 14 aa, synthetic construct
QDWCPRDLWVHCFA

SEQ ID NO: 7 - protein, 14 aa, synthetic construct
EDWCPRDLWVHCFA

SEQ ID NO: 8 - protein, 14 aa, synthetic construct
GDWCPRDLWVHCFA

SEQ ID NO: 9 - protein, 14 aa, synthetic construct
HDWCPRDLWVHCFA

SEQ ID NO: 10 - protein, 14 aa, synthetic construct
IDWCPRDLWVHCFA

SEQ ID NO: 11 - protein, 14 aa, synthetic construct
LDWCPRDLWVHCFA

SEQ ID NO: 12 - protein, 14 aa, synthetic construct
KDWCPRDLWVHCFA

SEQ ID NO: 13 - protein, 14 aa, synthetic construct
FDWCPRDLWVHCFA

SEQ ID NO: 14 - protein, 14 aa, synthetic construct
PDWCPRDLWVHCFA

SEQ ID NO: 15 - protein, 14 aa, synthetic construct
SDWCPRDLWVHCFA

SEQ ID NO: 16 - protein, 14 aa, synthetic construct
TDWCPRDLWVHCFA

SEQ ID NO: 17 - protein, 14 aa, synthetic construct
WDWCPRDLWVHCFA

SEQ ID NO: 18 - protein, 14 aa, synthetic construct
YDWCPRDLWVHCFA

SEQ ID NO: 19 - protein, 14 aa, synthetic construct
VDWCPRDLWVHCFA

SEQ ID NO: 20 - protein, 14 aa, synthetic construct
  SITE 1: note = Methionine sulfoxide
MDWCPRDLWVHCFA

SEQ ID NO: 21 - protein, 14 aa, synthetic construct
  SITE 1: note = Methionine sulfone
MDWCPRDLWVHCFA

SEQ ID NO: 22 - protein, 14 aa, synthetic construct
LDWCPRHLWALCFN

SEQ ID NO: 23 - protein, 14 aa, synthetic construct
IDWCPRYLWDECYN

SEQ ID NO: 24 - protein, 14 aa, synthetic construct
IDWCPLHLWHECYH

SEQ ID NO: 25 - protein, 14 aa, synthetic construct
VPWCQIISGLECLT

SEQ ID NO: 26 - protein, 14 aa, synthetic construct
IYWCPIDRWNDCYN

SEQ ID NO: 27 - protein, 8 aa, synthetic construct
GYTFTSYY

SEQ ID NO: 28 - protein, 8 aa, synthetic construct
IYPGNVNT

SEQ ID NO: 29 - protein, 13 aa, synthetic construct
TRSHYGLDWNFDV

SEQ ID NO: 30 - protein, 6 aa, synthetic construct
QNIYVW

SEQ ID NO: 31 - skipped

SEQ ID NO: 32 - protein, 9 aa, synthetic construct
QQGQTYPYT

SEQ ID NO: 33 - protein, 120 aa, synthetic construct
QVQLVQSGAEVKKPGASVKVSCKASGYTFTSYYIHWVRQAPGQGLEWIGSIYPGNVNTNYNEKFKDRATLTVDTSISTAYMELSRLRSDDTAVYFCTRSHYGLDWNFDVWGQGTTVTVSS

SEQ ID NO: 34 - protein, 107 aa, synthetic construct
DIQMTQSPSSLSASVGDRVTITCHASQNIYVWLNWYQQKPGKAPKLLIYKASNLHTGVPSRFSGSGSGTDFTLTISSLQPEDFATYYCQQGQTYPYTFGGGTKVEIK

SEQ ID NO: 35 - protein, 242 aa, synthetic construct
QVQLVQSGAEVKKPGASVKVSCKASGYTFTSYYIHWVRQAPGQGLEWIGSIYPGNVNTNYNEKFKDRATLTVDTSISTAYMELSRLRSDDTAVYFCTRSHYGLDWNFDVWGQGTTVTVSSGGGGSGGGGSGGGGSDIQMTQSPSSLSASVGDRVTITCHASQNIYVWLNWYQQKPGKAPKLLIYKASNLHTGVPSRFSGSGSGTDFTLTISSLQPEDFATYYCQQGQTYPYTFGGGTKVEIK

SEQ ID NO: 36 - protein, 15 aa, synthetic construct
GGGGSGGGGSGGGGS

SEQ ID NO: 37 - protein, 5 aa, synthetic construct
GGGGS

SEQ ID NO: 38 - protein, 9 aa, synthetic construct
GGGGSGGGS

SEQ ID NO: 39 - protein, 28 aa, synthetic construct
GGGGSGGGLSGRSDAGSPLGLAGSGGGS

SEQ ID NO: 40 - protein, 28 aa, synthetic construct
GSSGGSGGLSGRSDAGSPLGLAGSGGGS

SEQ ID NO: 41 - protein, 18 aa, synthetic construct
GGGGSLSGRSDNHGSSGT

SEQ ID NO: 42 - protein, 26 aa, synthetic construct
GGGGSSGGSGGSGLSGRSDNHGSSGT

SEQ ID NO: 43 - protein, 8 aa, synthetic construct
ASGRSDNH

SEQ ID NO: 44 - protein, 8 aa, synthetic construct
LAGRSDNH

SEQ ID NO: 45 - protein, 13 aa, synthetic construct
ISSGLASGRSDNH

SEQ ID NO: 46 - protein, 13 aa, synthetic construct
ISSGLLAGRSDNH

SEQ ID NO: 47 - protein, 8 aa, synthetic construct
LSGRSDNH

SEQ ID NO: 48 - protein, 13 aa, synthetic construct
ISSGLLSGRSDNP

SEQ ID NO: 49 - protein, 13 aa, synthetic construct
ISSGLLSGRSDNH

SEQ ID NO: 50 - protein, 16 aa, synthetic construct
LSGRSDNHSPLGLAGS

SEQ ID NO: 51 - protein, 16 aa, synthetic construct
SPLGLAGSLSGRSDNH

SEQ ID NO: 52 - protein, 12 aa, synthetic construct
SPLGLSGRSDNH

SEQ ID NO: 53 - protein, 16 aa, synthetic construct
LAGRSDNHSPLGLAGS

SEQ ID NO: 54 - protein, 16 aa, synthetic construct
LSGRSDNHVPLSLKMG

SEQ ID NO: 55 - protein, 16 aa, synthetic construct
LSGRSDNHVPLSLSMG

SEQ ID NO: 56 - protein, 31 aa, synthetic construct
GSSGGSGGSGGSGISSGLLSGRSDNHGSSGT

SEQ ID NO: 57 - protein, 28 aa, synthetic construct
GSSGGSGGSGGISSGLLSGRSDNHGGGS

SEQ ID NO: 58 - protein, 8 aa, synthetic construct
ASGRSDNH

SEQ ID NO: 59 - protein, 8 aa, synthetic construct
LAGRSDNH

SEQ ID NO: 60 - protein, 13 aa, synthetic construct
ISSGLASGRSDNH

SEQ ID NO: 61 - protein, 8 aa, synthetic construct
LSGRSDAG

SEQ ID NO: 62 - protein, 13 aa, synthetic construct
ISSGLLSGRSDAG

SEQ ID NO: 63 - protein, 18 aa, synthetic construct
AAGLLAPPGGLSGRSDAG

SEQ ID NO: 64 - protein, 12 aa, synthetic construct
SPLGLSGRSDAG

SEQ ID NO: 65 - protein, 15 aa, synthetic construct
LSGRSDAGSPLGLAG

SEQ ID NO: 66 - protein, 16 aa, synthetic construct
SGGGGSGGASSGAGGS

SEQ ID NO: 67 - protein, 242 aa, synthetic construct
QVQLVQSGAEVKKPGASVKVSCKASGYTFTSYYIHWVRQAPGQCLEWIGSIYPGNVNTNYNEKFKDRATLTVDTSISTAYMELSRLRSDDTAVYFCTRSHYGLDWNFDVWGQGTTVTVSSGGGGSGGGGSGGGGSDIQMTQSPSSLSASVGDRVTITCHASQNIYVWLNWYQQKPGKAPKLLIYKASNLHTGVPSRFSGSGSGTDFTLTISSLQPEDFATYYCQQGQTYPYTFGCGTKVEIK

SEQ ID NO: 68 - protein, 242 aa, synthetic construct
DIQMTQSPSSLSASVGDRVTITCHASQNIYVWLNWYQQKPGKAPKLLIYKASNLHTGVPSRFSGSGSGTDFTLTISSLQPEDFATYYCQQGQTYPYTFGGGTKVEIKGGGGSGGGGSGGGGSQVQLVQSGAEVKKPGASVKVSCKASGYTFTSYYIHWVRQAPGQGLEWIGSIYPGNVNTNYNEKFKDRATLTVDTSISTAYMELSRLRSDDTAVYFCTRSHYGLDWNFDVWGQGTTVTVSS

SEQ ID NO: 69 - protein, 242 aa, synthetic construct
DIQMTQSPSSLSASVGDRVTITCHASQNIYVWLNWYQQKPGKAPKLLIYKASNLHTGVPSRFSGSGSGTDFTLTISSLQPEDFATYYCQQGQTYPYTFGCGTKVEIKGGGGSGGGGSGGGGSQVQLVQSGAEVKKPGASVKVSCKASGYTFTSYYIHWVRQAPGQCLEWIGSIYPGNVNTNYNEKFKDRATLTVDTSISTAYMELSRLRSDDTAVYFCTRSHYGLDWNFDVWGQGTTVTVSS

SEQ ID NO: 70 - protein, 473 aa, synthetic construct
QVQLVQSGAEVKKPGASVKVSCKASGYTFTSYYIHWVRQAPGQGLEWIGSIYPGNVNTNYNEKFKDRATLTVDTSISTAYMELSRLRSDDTAVYFCTRSHYGLDWNFDVWGQGTTVTVSSGGGGSGGGGSGGGGSDIQMTQSPSSLSASVGDRVTITCHASQNIYVWLNWYQQKPGKAPKLLIYKASNLHTGVPSRFSGSGSGTDFTLTISSLQPEDFATYYCQQGQTYPYTFGGGTKVEIKGGGGSQVQLVQSGAEVKKPGSSVKVSCKTSGDTFSTYAISWVRQAPGQGLEWMGGIIPIFGKAHYAQKFQGRVTITADESTSTAYMELSSLRSEDTAVYFCARKFHFVSGSPFGMDVWGQGTTVTVSSASTKGPSVFPLAPSSKSTSGGTAALGCLVKDYFPEPVTVSWNSGALTSGVHTFPAVLQSSGLYSLSSVVTVPSSSLGTQTYICNVNHKPSNTKVDKKVEPKSC

SEQ ID NO: 71 - protein, 213 aa, synthetic construct
EIVLTQSPATLSLSPGERATLSCRASQSVSSYLAWYQQKPGQAPRLLIYDASNRATGIPARFSGSGSGTDFTLTISSLEPEDFAVYYCQQRSNWPTFGQGTKVEIKRTVAAPSVFIFPPSDEQLKSGTASVVCLLNNFYPREAKVQWKVDNALQSGNSQESVTEQDSKDSTYSLSSTLTLSKADYEKHKVYACEVTHQGLSSPVTKSFNRGEC

SEQ ID NO: 72 - protein, 213 aa, synthetic construct; identical to SEQ ID NO: 71

SEQ ID NO: 73 - protein, 473 aa, synthetic construct
QVQLVQSGAEVKKPGASVKVSCKASGYTFTSYYIHWVRQAPGQCLEWIGSIYPGNVNTNYNEKFKDRATLTVDTSISTAYMELSRLRSDDTAVYFCTRSHYGLDWNFDVWGQGTTVTVSSGGGGSGGGGSGGGGSDIQMTQSPSSLSASVGDRVTITCHASQNIYVWLNWYQQKPGKAPKLLIYKASNLHTGVPSRFSGSGSGTDFTLTISSLQPEDFATYYCQQGQTYPYTFGCGTKVEIKGGGGSQVQLVQSGAEVKKPGSSVKVSCKTSGDTFSTYAISWVRQAPGQGLEWMGGIIPIFGKAHYAQKFQGRVTITADESTSTAYMELSSLRSEDTAVYFCARKFHFVSGSPFGMDVWGQGTTVTVSSASTKGPSVFPLAPSSKSTSGGTAALGCLVKDYFPEPVTVSWNSGALTSGVHTFPAVLQSSGLYSLSSVVTVPSSSLGTQTYICNVNHKPSNTKVDKKVEPKSC

SEQ ID NO: 74 - protein, 284 aa, synthetic construct
MDWCPRDLWVHCFAGSSGGSGGLSGRSDAGSPLGLAGSGGGSQVQLVQSGAEVKKPGASVKVSCKASGYTFTSYYIHWVRQAPGQGLEWIGSIYPGNVNTNYNEKFKDRATLTVDTSISTAYMELSRLRSDDTAVYFCTRSHYGLDWNFDVWGQGTTVTVSSGGGGSGGGGSGGGGSDIQMTQSPSSLSASVGDRVTITCHASQNIYVWLNWYQQKPGKAPKLLIYKASNLHTGVPSRFSGSGSGTDFTLTISSLQPEDFATYYCQQGQTYPYTFGGGTKVEIK

SEQ ID NO: 75 - protein, 284 aa, synthetic construct
MDWCPRDLWVHCFAGSSGGSGGLSGRSDAGSPLGLAGSGGGSQVQLVQSGAEVKKPGASVKVSCKASGYTFTSYYIHWVRQAPGQCLEWIGSIYPGNVNTNYNEKFKDRATLTVDTSISTAYMELSRLRSDDTAVYFCTRSHYGLDWNFDVWGQGTTVTVSSGGGGSGGGGSGGGGSDIQMTQSPSSLSASVGDRVTITCHASQNIYVWLNWYQQKPGKAPKLLIYKASNLHTGVPSRFSGSGSGTDFTLTISSLQPEDFATYYCQQGQTYPYTFGCGTKVEIK

SEQ ID NO: 76 - protein, 284 aa, synthetic construct; identical to SEQ ID NO: 74

SEQ ID NO: 77 - protein, 284 aa, synthetic construct; identical to SEQ ID NO: 74

SEQ ID NO: 78 - protein, 284 aa, synthetic construct; identical to SEQ ID NO: 75

SEQ ID NO: 79 - protein, 284 aa, synthetic construct
MDWCPRDLWVHCFAGGGGSGGGSGGGGSGGASSGAGGSGGGSQVQLVQSGAEVKKPGASVKVSCKASGYTFTSYYIHWVRQAPGQCLEWIGSIYPGNVNTNYNEKFKDRATLTVDTSISTAYMELSRLRSDDTAVYFCTRSHYGLDWNFDVWGQGTTVTVSSGGGGSGGGGSGGGGSDIQMTQSPSSLSASVGDRVTITCHASQNIYVWLNWYQQKPGKAPKLLIYKASNLHTGVPSRFSGSGSGTDFTLTISSLQPEDFATYYCQQGQTYPYTFGCGTKVEIK

SEQ ID NO: 80 - protein, 284 aa, synthetic construct; identical to SEQ ID NO: 75

SEQ ID NO: 81 - protein, 284 aa, synthetic construct; identical to SEQ ID NO: 79

SEQ ID NO: 82 - protein, 284 aa, synthetic construct; identical to SEQ ID NO: 74

SEQ ID NO: 83 - protein, 284 aa, synthetic construct
MDWCPRDLWVHCFAGGGGSGGGSGGGGSGGASSGAGGSGGGSQVQLVQSGAEVKKPGASVKVSCKASGYTFTSYYIHWVRQAPGQGLEWIGSIYPGNVNTNYNEKFKDRATLTVDTSISTAYMELSRLRSDDTAVYFCTRSHYGLDWNFDVWGQGTTVTVSSGGGGSGGGGSGGGGSDIQMTQSPSSLSASVGDRVTITCHASQNIYVWLNWYQQKPGKAPKLLIYKASNLHTGVPSRFSGSGSGTDFTLTISSLQPEDFATYYCQQGQTYPYTFGGGTKVEIK

SEQ ID NO: 84 - protein, 284 aa, synthetic construct
MDWCPRDLWVHCFAGSSGGSGGLSGRSDAGSPLGLAGSGGGSDIQMTQSPSSLSASVGDRVTITCHASQNIYVWLNWYQQKPGKAPKLLIYKASNLHTGVPSRFSGSGSGTDFTLTISSLQPEDFATYYCQQGQTYPYTFGGGTKVEIKGGGGSGGGGSGGGGSQVQLVQSGAEVKKPGASVKVSCKASGYTFTSYYIHWVRQAPGQGLEWIGSIYPGNVNTNYNEKFKDRATLTVDTSISTAYMELSRLRSDDTAVYFCTRSHYGLDWNFDVWGQGTTVTVSS

SEQ ID NO: 85 - protein, 284 aa, synthetic construct
MDWCPRDLWVHCFAGSSGGSGGLSGRSDAGSPLGLAGSGGGSDIQMTQSPSSLSASVGDRVTITCHASQNIYVWLNWYQQKPGKAPKLLIYKASNLHTGVPSRFSGSGSGTDFTLTISSLQPEDFATYYCQQGQTYPYTFGCGTKVEIKGGGGSGGGGSGGGGSQVQLVQSGAEVKKPGASVKVSCKASGYTFTSYYIHWVRQAPGQCLEWIGSIYPGNVNTNYNEKFKDRATLTVDTSISTAYMELSRLRSDDTAVYFCTRSHYGLDWNFDVWGQGTTVTVSS

SEQ ID NO: 86 - protein, 284 aa, synthetic construct
MDWCPRDLWVHCFAGGGGSGGGSGGGGSGGASSGAGGSGGGSDIQMTQSPSSLSASVGDRVTITCHASQNIYVWLNWYQQKPGKAPKLLIYKASNLHTGVPSRFSGSGSGTDFTLTISSLQPEDFATYYCQQGQTYPYTFGGGTKVEIKGGGGSGGGGSGGGGSQVQLVQSGAEVKKPGASVKVSCKASGYTFTSYYIHWVRQAPGQGLEWIGSIYPGNVNTNYNEKFKDRATLTVDTSISTAYMELSRLRSDDTAVYFCTRSHYGLDWNFDVWGQGTTVTVSS

SEQ ID NO: 87 - protein, 284 aa, synthetic construct
MDWCPRDLWVHCFAGGGGSGGGSGGGGSGGASSGAGGSGGGSDIQMTQSPSSLSASVGDRVTITCHASQNIYVWLNWYQQKPGKAPKLLIYKASNLHTGVPSRFSGSGSGTDFTLTISSLQPEDFATYYCQQGQTYPYTFGCGTKVEIKGGGGSGGGGSGGGGSQVQLVQSGAEVKKPGASVKVSCKASGYTFTSYYIHWVRQAPGQCLEWIGSIYPGNVNTNYNEKFKDRATLTVDTSISTAYMELSRLRSDDTAVYFCTRSHYGLDWNFDVWGQGTTVTVSS

SEQ ID NO: 88 - protein, 284 aa, synthetic construct
IDWCPRYLWDECYNAGSGGSGGLSGRSDAGSPLGLAGSGGGSQVQLVQSGAEVKKPGASVKVSCKASGYTFTSYYIHWVRQAPGQGLEWIGSIYPGNVNTNYNEKFKDRATLTVDTSISTAYMELSRLRSDDTAVYFCTRSHYGLDWNFDVWGQGTTVTVSSGGGGSGGGGSGGGGSDIQMTQSPSSLSASVGDRVTITCHASQNIYVWLNWYQQKPGKAPKLLIYKASNLHTGVPSRFSGSGSGTDFTLTISSLQPEDFATYYCQQGQTYPYTFGGGTKVEIK

SEQ ID NO: 89 - protein, 284 aa, synthetic construct
IDWCPRYLWDECYNAGGGSGGGSGGGGSGGASSGAGGSGGGSQVQLVQSGAEVKKPGASVKVSCKASGYTFTSYYIHWVRQAPGQGLEWIGSIYPGNVNTNYNEKFKDRATLTVDTSISTAYMELSRLRSDDTAVYFCTRSHYGLDWNFDVWGQGTTVTVSSGGGGSGGGGSGGGGSDIQMTQSPSSLSASVGDRVTITCHASQNIYVWLNWYQQKPGKAPKLLIYKASNLHTGVPSRFSGSGSGTDFTLTISSLQPEDFATYYCQQGQTYPYTFGGGTKVEIK

SEQ ID NO: 90 - protein, 284 aa, synthetic construct
IDWCPRYLWDECYNAGSGGSGGLSGRSDAGSPLGLAGSGGGSQVQLVQSGAEVKKPGASVKVSCKASGYTFTSYYIHWVRQAPGQCLEWIGSIYPGNVNTNYNEKFKDRATLTVDTSISTAYMELSRLRSDDTAVYFCTRSHYGLDWNFDVWGQGTTVTVSSGGGGSGGGGSGGGGSDIQMTQSPSSLSASVGDRVTITCHASQNIYVWLNWYQQKPGKAPKLLIYKASNLHTGVPSRFSGSGSGTDFTLTISSLQPEDFATYYCQQGQTYPYTFGCGTKVEIK

SEQ ID NO: 91 - protein, 284 aa, synthetic construct
IDWCPRYLWDECYNAGGGSGGGSGGGGSGGASSGAGGSGGGSQVQLVQSGAEVKKPGASVKVSCKASGYTFTSYYIHWVRQAPGQCLEWIGSIYPGNVNTNYNEKFKDRATLTVDTSISTAYMELSRLRSDDTAVYFCTRSHYGLDWNFDVWGQGTTVTVSSGGGGSGGGGSGGGGSDIQMTQSPSSLSASVGDRVTITCHASQNIYVWLNWYQQKPGKAPKLLIYKASNLHTGVPSRFSGSGSGTDFTLTISSLQPEDFATYYCQQGQTYPYTFGCGTKVEIK

SEQ ID NO: 92 - protein, 8 aa, synthetic construct
GSTFYTAV

SEQ ID NO: 93 - protein, 8 aa, synthetic construct
IRWTALTT

SEQ ID NO: 94 - protein, 17 aa, synthetic construct
AARGTLGLFTTADSYDY

SEQ ID NO: 95 - protein, 124 aa, synthetic construct
EVQLVESGGGLVQPGGSLRLSCAASGSTFYTAVMGWVRQAPGKGLEWVAAIRWTALTTSYADSVKGRFTISRDGAKTTLYLQMNSLRPEDTAVYYCAARGTLGLFTTADSYDYWGQGTLVTVSS

SEQ ID NO: 96 - protein, 8 aa, synthetic construct
GFTFSKFG

SEQ ID NO: 97 - protein, 8 aa, synthetic construct
ISGSGRDT

SEQ ID NO: 98 - protein, 8 aa, synthetic construct
TIGGSLSV

SEQ ID NO: 99 - protein, 115 aa, synthetic construct
EVQLVESGGGLVQPGNSLRLSCAASGFTFSKFGMSWVRQAPGKGLEWVSSISGSGRDTLYADSVKGRFTISRDNAKTTLYLQMNSLRPEDTAVYYCTIGGSLSVSSQGTLVTVSS

SEQ ID NO: 100 - protein, 419 aa, synthetic construct
EVQLVESGGGLVQPGGSLRLSCAASGSTFYTAVMGWVRQAPGKGLEWVAAIRWTALTTSYADSVKGRFTISRDGAKTTLYLQMNSLRPEDTAVYYCAARGTLGLFTTADSYDYWGQGTLVTVSSGGGGSGGGSGGMDWCPRDLWVHCFAGSSGGSGGLSGRSDAGSPLGLAGSGGGSQVQLVQSGAEVKKPGASVKVSCKASGYTFTSYYIHWVRQAPGQGLEWIGSIYPGNVNTNYNEKFKDRATLTVDTSISTAYMELSRLRSDDTAVYFCTRSHYGLDWNFDVWGQGTTVTVSSGGGGSGGGGSGGGGSDIQMTQSPSSLSASVGDRVTITCHASQNIYVWLNWYQQKPGKAPKLLIYKASNLHTGVPSRFSGSGSGTDFTLTISSLQPEDFATYYCQQGQTYPYTFGGGTKVEIK

SEQ ID NO: 101 - protein, 419 aa, synthetic construct
EVQLVESGGGLVQPGGSLRLSCAASGSTFYTAVMGWVRQAPGKGLEWVAAIRWTALTTSYADSVKGRFTISRDGAKTTLYLQMNSLRPEDTAVYYCAARGTLGLFTTADSYDYWGQGTLVTVSSGGGGSGGGSGGMDWCPRDLWVHCFAGSSGGSGGLSGRSDAGSPLGLAGSGGGSQVQLVQSGAEVKKPGASVKVSCKASGYTFTSYYIHWVRQAPGQCLEWIGSIYPGNVNTNYNEKFKDRATLTVDTSISTAYMELSRLRSDDTAVYFCTRSHYGLDWNFDVWGQGTTVTVSSGGGGSGGGGSGGGGSDIQMTQSPSSLSASVGDRVTITCHASQNIYVWLNWYQQKPGKAPKLLIYKASNLHTGVPSRFSGSGSGTDFTLTISSLQPEDFATYYCQQGQTYPYTFGCGTKVEIK

SEQ ID NO: 102 - protein, 419 aa, synthetic construct
EVQLVESGGGLVQPGGSLRLSCAASGSTFYTAVMGWVRQAPGKGLEWVAAIRWTALTTSYADSVKGRFTISRDNAKTTLYLQMNSLRPEDTAVYYCAARGTLGLFTTADAYDYWGQGTLVTVSSGGGGSGGGSGGMDWCPRDLWVHCFAGSSGGSGGLSGRSDAGSPLGLAGSGGGSQVQLVQSGAEVKKPGASVKVSCKASGYTFTSYYIHWVRQAPGQGLEWIGSIYPGNVNTNYNEKFKDRATLTVDTSISTAYMELSRLRSDDTAVYFCTRSHYGLDWNFDVWGQGTTVTVSSGGGGSGGGGSGGGGSDIQMTQSPSSLSASVGDRVTITCHASQNIYVWLNWYQQKPGKAPKLLIYKASNLHTGVPSRFSGSGSGTDFTLTISSLQPEDFATYYCQQGQTYPYTFGGGTKVEIK

SEQ ID NO: 103 - protein, 419 aa, synthetic construct; identical to SEQ ID NO: 102

SEQ ID NO: 104 - protein, 419 aa, synthetic construct
EVQLVESGGGLVQPGGSLRLSCAASGSTFYTAVMGWVRQAPGKGLEWVAAIRWTALTTSYADSVKGRFTISRDNAKTTLYLQMNSLRPEDTAVYYCAARGTLGLFTTADAYDYWGQGTLVTVSSGGGGSGGGSGGMDWCPRDLWVHCFAGSSGGSGGLSGRSDAGSPLGLAGSGGGSQVQLVQSGAEVKKPGASVKVSCKASGYTFTSYYIHWVRQAPGQCLEWIGSIYPGNVNTNYNEKFKDRATLTVDTSISTAYMELSRLRSDDTAVYFCTRSHYGLDWNFDVWGQGTTVTVSSGGGGSGGGGSGGGGSDIQMTQSPSSLSASVGDRVTITCHASQNIYVWLNWYQQKPGKAPKLLIYKASNLHTGVPSRFSGSGSGTDFTLTISSLQPEDFATYYCQQGQTYPYTFGCGTKVEIK

SEQ ID NO: 105 - protein, 419 aa, synthetic construct
EVQLVESGGGLVQPGGSLRLSCAASGSTFYTAVMGWVRQAPGKGLEWVAAIRWTALTTSYADSVKGRFTISRDNAKTTLYLQMNSLRPEDTAVYYCAARGTLGLFTTADAYDYWGQGTLVTVSSGGGGSGGGSGGMDWCPRDLWVHCFAGGGGSGGGSGGGGSGGASSGAGGSGGGSQVQLVQSGAEVKKPGASVKVSCKASGYTFTSYYIHWVRQAPGQCLEWIGSIYPGNVNTNYNEKFKDRATLTVDTSISTAYMELSRLRSDDTAVYFCTRSHYGLDWNFDVWGQGTTVTVSSGGGGSGGGGSGGGGSDIQMTQSPSSLSASVGDRVTITCHASQNIYVWLNWYQQKPGKAPKLLIYKASNLHTGVPSRFSGSGSGTDFTLTISSLQPEDFATYYCQQGQTYPYTFGCGTKVEIK

SEQ ID NO: 106 - protein, 419 aa, synthetic construct; identical to SEQ ID NO: 101

SEQ ID NO: 107 - protein, 419 aa, synthetic construct
EVQLVESGGGLVQPGGSLRLSCAASGSTFYTAVMGWVRQAPGKGLEWVAAIRWTALTTSYADSVKGRFTISRDGAKTTLYLQMNSLRPEDTAVYYCAARGTLGLFTTADSYDYWGQGTLVTVSSGGGGSGGGSGGMDWCPRDLWVHCFAGGGGSGGGSGGGGSGGASSGAGGSGGGSQVQLVQSGAEVKKPGASVKVSCKASGYTFTSYYIHWVRQAPGQCLEWIGSIYPGNVNTNYNEKFKDRATLTVDTSISTAYMELSRLRSDDTAVYFCTRSHYGLDWNFDVWGQGTTVTVSSGGGGSGGGGSGGGGSDIQMTQSPSSLSASVGDRVTITCHASQNIYVWLNWYQQKPGKAPKLLIYKASNLHTGVPSRFSGSGSGTDFTLTISSLQPEDFATYYCQQGQTYPYTFGCGTKVEIK

SEQ ID NO: 108 - protein, 419 aa, synthetic construct; identical to SEQ ID NO: 100

SEQ ID NO: 109 - protein, 419 aa, synthetic construct
EVQLVESGGGLVQPGGSLRLSCAASGSTFYTAVMGWVRQAPGKGLEWVAAIRWTALTTSYADSVKGRFTISRDGAKTTLYLQMNSLRPEDTAVYYCAARGTLGLFTTADSYDYWGQGTLVTVSSGGGGSGGGSGGMDWCPRDLWVHCFAGGGGSGGGSGGGGSGGASSGAGGSGGGSQVQLVQSGAEVKKPGASVKVSCKASGYTFTSYYIHWVRQAPGQGLEWIGSIYPGNVNTNYNEKFKDRATLTVDTSISTAYMELSRLRSDDTAVYFCTRSHYGLDWNFDVWGQGTTVTVSSGGGGSGGGGSGGGGSDIQMTQSPSSLSASVGDRVTITCHASQNIYVWLNWYQQKPGKAPKLLIYKASNLHTGVPSRFSGSGSGTDFTLTISSLQPEDFATYYCQQGQTYPYTFGGGTKVEIK

SEQ ID NO: 110 - protein, 419 aa, synthetic construct
EVQLVESGGGLVQPGGSLRLSCAASGSTFYTAVMGWVRQAPGKGLEWVAAIRWTALTTSYADSVKGRFTISRDGAKTTLYLQMNSLRPEDTAVYYCAARGTLGLFTTADSYDYWGQGTLVTVSSGGGGSGGGSGGMDWCPRDLWVHCFAGSSGGSGGLSGRSDAGSPLGLAGSGGGSDIQMTQSPSSLSASVGDRVTITCHASQNIYVWLNWYQQKPGKAPKLLIYKASNLHTGVPSRFSGSGSGTDFTLTISSLQPEDFATYYCQQGQTYPYTFGGGTKVEIKGGGGSGGGGSGGGGSQVQLVQSGAEVKKPGASVKVSCKASGYTFTSYYIHWVRQAPGQGLEWIGSIYPGNVNTNYNEKFKDRATLTVDTSISTAYMELSRLRSDDTAVYFCTRSHYGLDWNFDVWGQGTTVTVSS

SEQ ID NO: 111 - protein, 419 aa, synthetic construct
EVQLVESGGGLVQPGGSLRLSCAASGSTFYTAVMGWVRQAPGKGLEWVAAIRWTALTTSYADSVKGRFTISRDGAKTTLYLQMNSLRPEDTAVYYCAARGTLGLFTTADSYDYWGQGTLVTVSSGGGGSGGGSGGMDWCPRDLWVHCFAGSSGGSGGLSGRSDAGSPLGLAGSGGGSDIQMTQSPSSLSASVGDRVTITCHASQNIYVWLNWYQQKPGKAPKLLIYKASNLHTGVPSRFSGSGSGTDFTLTISSLQPEDFATYYCQQGQTYPYTFGCGTKVEIKGGGGSGGGGSGGGGSQVQLVQSGAEVKKPGASVKVSCKASGYTFTSYYIHWVRQAPGQCLEWIGSIYPGNVNTNYNEKFKDRATLTVDTSISTAYMELSRLRSDDTAVYFCTRSHYGLDWNFDVWGQGTTVTVSS

SEQ ID NO: 112 - protein, 419 aa, synthetic construct
EVQLVESGGGLVQPGGSLRLSCAASGSTFYTAVMGWVRQAPGKGLEWVAAIRWTALTTSYADSVKGRFTISRDGAKTTLYLQMNSLRPEDTAVYYCAARGTLGLFTTADSYDYWGQGTLVTVSSGGGGSGGGSGGMDWCPRDLWVHCFAGGGGSGGGSGGGGSGGASSGAGGSGGGSDIQMTQSPSSLSASVGDRVTITCHASQNIYVWLNWYQQKPGKAPKLLIYKASNLHTGVPSRFSGSGSGTDFTLTISSLQPEDFATYYCQQGQTYPYTFGGGTKVEIKGGGGSGGGGSGGGGSQVQLVQSGAEVKKPGASVKVSCKASGYTFTSYYIHWVRQAPGQGLEWIGSIYPGNVNTNYNEKFKDRATLTVDTSISTAYMELSRLRSDDTAVYFCTRSHYGLDWNFDVWGQGTTVTVSS

SEQ ID NO: 113 - protein, 419 aa, synthetic construct
EVQLVESGGGLVQPGGSLRLSCAASGSTFYTAVMGWVRQAPGKGLEWVAAIRWTALTTSYADSVKGRFTISRDGAKTTLYLQMNSLRPEDTAVYYCAARGTLGLFTTADSYDYWGQGTLVTVSSGGGGSGGGSGGMDWCPRDLWVHCFAGGGGSGGGSGGGGSGGASSGAGGSGGGSDIQMTQSPSSLSASVGDRVTITCHASQNIYVWLNWYQQKPGKAPKLLIYKASNLHTGVPSRFSGSGSGTDFTLTISSLQPEDFATYYCQQGQTYPYTFGCGTKVEIKGGGGSGGGGSGGGGSQVQLVQSGAEVKKPGASVKVSCKASGYTFTSYYIHWVRQAPGQCLEWIGSIYPGNVNTNYNEKFKDRATLTVDTSISTAYMELSRLRSDDTAVYFCTRSHYGLDWNFDVWGQGTTVTVSS

SEQ ID NO: 114 - protein, 419 aa, synthetic construct
EVQLVESGGGLVQPGGSLRLSCAASGSTFYTAVMGWVRQAPGKGLEWVAAIRWTALTTSYADSVKGRFTISRDGAKTTLYLQMNSLRPEDTAVYYCAARGTLGLFTTADSYDYWGQGTLVTVSSGGGGSGGGSGGIDWCPRYLWDECYNAGSGGSGGLSGRSDAGSPLGLAGSGGGSQVQLVQSGAEVKKPGASVKVSCKASGYTFTSYYIHWVRQAPGQGLEWIGSIYPGNVNTNYNEKFKDRATLTVDTSISTAYMELSRLRSDDTAVYFCTRSHYGLDWNFDVWGQGTTVTVSSGGGGSGGGGSGGGGSDIQMTQSPSSLSASVGDRVTITCHASQNIYVWLNWYQQKPGKAPKLLIYKASNLHTGVPSRFSGSGSGTDFTLTISSLQPEDFATYYCQQGQTYPYTFGGGTKVEIK

SEQ ID NO: 115 - protein, 419 aa, synthetic construct
EVQLVESGGGLVQPGGSLRLSCAASGSTFYTAVMGWVRQAPGKGLEWVAAIRWTALTTSYADSVKGRFTISRDGAKTTLYLQMNSLRPEDTAVYYCAARGTLGLFTTADSYDYWGQGTLVTVSSGGGGSGGGSGGIDWCPRYLWDECYNAGGGSGGGSGGGGSGGASSGAGGSGGGSQVQLVQSGAEVKKPGASVKVSCKASGYTFTSYYIHWVRQAPGQGLEWIGSIYPGNVNTNYNEKFKDRATLTVDTSISTAYMELSRLRSDDTAVYFCTRSHYGLDWNFDVWGQGTTVTVSSGGGGSGGGGSGGGGSDIQMTQSPSSLSASVGDRVTITCHASQNIYVWLNWYQQKPGKAPKLLIYKASNLHTGVPSRFSGSGSGTDFTLTISSLQPEDFATYYCQQGQTYPYTFGGGTKVEIK

SEQ ID NO: 116 - protein, 419 aa, synthetic construct
EVQLVESGGGLVQPGGSLRLSCAASGSTFYTAVMGWVRQAPGKGLEWVAAIRWTALTTSYADSVKGRFTISRDGAKTTLYLQMNSLRPEDTAVYYCAARGTLGLFTTADSYDYWGQGTLVTVSSGGGGSGGGSGGIDWCPRYLWDECYNAGSGGSGGLSGRSDAGSPLGLAGSGGGSQVQLVQSGAEVKKPGASVKVSCKASGYTFTSYYIHWVRQAPGQCLEWIGSIYPGNVNTNYNEKFKDRATLTVDTSISTAYMELSRLRSDDTAVYFCTRSHYGLDWNFDVWGQGTTVTVSSGGGGSGGGGSGGGGSDIQMTQSPSSLSASVGDRVTITCHASQNIYVWLNWYQQKPGKAPKLLIYKASNLHTGVPSRFSGSGSGTDFTLTISSLQPEDFATYYCQQGQTYPYTFGCGTKVEIK

SEQ ID NO: 117 - protein, 419 aa, synthetic construct
EVQLVESGGGLVQPGGSLRLSCAASGSTFYTAVMGWVRQAPGKGLEWVAAIRWTALTTSYADSVKGRFTISRDGAKTTLYLQMNSLRPEDTAVYYCAARGTLGLFTTADSYDYWGQGTLVTVSSGGGGSGGGSGGIDWCPRYLWDECYNAGGGSGGGSGGGGSGGASSGAGGSGGGSQVQLVQSGAEVKKPGASVKVSCKASGYTFTSYYIHWVRQAPGQCLEWIGSIYPGNVNTNYNEKFKDRATLTVDTSISTAYMELSRLRSDDTAVYFCTRSHYGLDWNFDVWGQGTTVTVSSGGGGSGGGGSGGGGSDIQMTQSPSSLSASVGDRVTITCHASQNIYVWLNWYQQKPGKAPKLLIYKASNLHTGVPSRFSGSGSGTDFTLTISSLQPEDFATYYCQQGQTYPYTFGCGTKVEIK

SEQ ID NO: 118 - protein, 124 aa, synthetic construct
EVQLVESGGGLVQPGGSLRLSCAASGSTFYTAVMGWVRQAPGKGLEWVAAIRWTALTTSYADSVKGRFTISRDNAKTTLYLQMNSLRPEDTAVYYCAARGTLGLFTTADAYDYWGQGTLVTVSS

SEQ ID NO: 119 - protein, 28 aa, synthetic construct
GGGGSGGGSGGGGSGGASSGAGGSGGGS

SEQ ID NO: 120 - protein, 14 aa, synthetic construct
YWSCFQIPFTCFYF

SEQ ID NO: 121 - protein, 14 aa, synthetic construct
WECLKYTEANACTY

SEQ ID NO: 122 - protein, 14 aa, synthetic construct
FMCLPQNPHPLCFK

SEQ ID NO: 123 - protein, 14 aa, synthetic construct
PDCQTILFKPWCVR

SEQ ID NO: 124 - protein, 14 aa, synthetic construct
ACDTYFAGMINECF

SEQ ID NO: 125 - protein, 14 aa, synthetic construct
GCQYPWAFDAMSCP

SEQ ID NO: 126 - protein, 14 aa, synthetic construct
WCWDYKLWVPTQCP

SEQ ID NO: 127 - protein, 14 aa, synthetic construct
WCWDYREWVPMTCP

SEQ ID NO: 128 - protein, 14 aa, synthetic construct
ECHWSMWAVGHACF

SEQ ID NO: 129 - protein, 14 aa, synthetic construct
YCAGHSPINIGKCL

SEQ ID NO: 130 - protein, 14 aa, synthetic construct
WCWDYKLWVPMTCP

SEQ ID NO: 131 - protein, 14 aa, synthetic construct
DCWWMFESYPGRCI

SEQ ID NO: 132 - protein, 14 aa, synthetic construct
YCAGHAWQYINKCL

SEQ ID NO: 133 - protein, 14 aa, synthetic construct
WCWYYREWVPMTCP

SEQ ID NO: 134 - protein, 14 aa, synthetic construct
YWYCSPSIVRCVLV

SEQ ID NO: 135 - protein, 14 aa, synthetic construct
PDCHTILFKPWCVR

SEQ ID NO: 136 - protein, 14 aa, synthetic construct
WICDKSGSIMLCRA

SEQ ID NO: 137 - protein, 14 aa, synthetic construct
SCAAGASYAWPYCL

SEQ ID NO: 138 - protein, 14 aa, synthetic construct
DCPWLSGFSRPLLC

SEQ ID NO: 139 - protein, 14 aa, synthetic construct
YCAGMSTIQLWLKC

SEQ ID NO: 140 - protein, 14 aa, synthetic construct
YCAGHMPQYEVKCL

SEQ ID NO: 141 - protein, 14 aa, synthetic construct
YCAGHTEEHYVKCM

SEQ ID NO: 142 - protein, 14 aa, synthetic construct
YCMGHSHEHIWKCL

SEQ ID NO: 143 - protein, 14 aa, synthetic construct
YCAGHSHEYLAKCE

SEQ ID NO: 144 - protein, 14 aa, synthetic construct
ACAAGASYAWPYCL

SEQ ID NO: 145 - protein, 14 aa, synthetic construct
SCAAAASYAWPYCL

SEQ ID NO: 146 - protein, 14 aa, synthetic construct
SCAAGAAYAWPYCL

SEQ ID NO: 147 - protein, 14 aa, synthetic construct
SCAAGASAAWPYCL

SEQ ID NO: 148 - protein, 14 aa, synthetic construct
SCAAGASYAAPYCL

SEQ ID NO: 149 - protein, 14 aa, synthetic construct
SCAAGASYAWAYCL

SEQ ID NO: 150 - protein, 14 aa, synthetic construct
SCAAGASYAWPACL

SEQ ID NO: 151 - protein, 14 aa, synthetic construct
SCAAGASYAWPYCA

SEQ ID NO: 152 - protein, 14 aa, synthetic construct
ACAGHAWQYINKCL

SEQ ID NO: 153 - protein, 14 aa, synthetic construct
YCAAHAWQYINKCL

SEQ ID NO: 154 - protein, 14 aa, synthetic construct
YCAGAAWQYINKCL

SEQ ID NO: 155 - protein, 14 aa, synthetic construct
YCAGHAAQYINKCL

SEQ ID NO: 156 - protein, 14 aa, synthetic construct
YCAGHAWAYINKCL

SEQ ID NO: 157 - protein, 14 aa, synthetic construct
YCAGHAWQAINKCL

SEQ ID NO: 158 - protein, 14 aa, synthetic construct
YCAGHAWQYANKCL

SEQ ID NO: 159 - protein, 14 aa, synthetic construct
YCAGHAWQYIAKCL

SEQ ID NO: 160 - protein, 14 aa, synthetic construct
YCAGHAWQYINACL

SEQ ID NO: 161 - protein, 14 aa, synthetic construct
YCAGHAWQYINKCA

SEQ ID NO: 162 - protein, 14 aa, synthetic construct
YCEGHSPEYILKCL

SEQ ID NO: 163 - protein, 14 aa, synthetic construct
YCEGHRPEYILKCL

SEQ ID NO: 164 - protein, 14 aa, synthetic construct
YCEGHEGIYFWKCL

SEQ ID NO: 165 - protein, 14 aa, synthetic construct
YCEGHLPEYIEKCL

SEQ ID NO: 166 - protein, 14 aa, synthetic construct
YCEGHAPEYIAKCL

SEQ ID NO: 167 - protein, 14 aa, synthetic construct
YCEGHAPEYIRKCL

SEQ ID NO: 168 - protein, 14 aa, synthetic construct
YCEGHAPEYIWKCL

SEQ ID NO: 169 - protein, 14 aa, synthetic construct
YCEGHSQENIWKCL

SEQ ID NO: 170 - protein, 14 aa, synthetic construct
YCEGHLPEYLGKCL

SEQ ID NO: 171 - protein, 14 aa, synthetic construct
YCEGHLPEYREKCL

SEQ ID NO: 172 - protein, 14 aa, synthetic construct
YCEGHLPEYLAKCL

SEQ ID NO: 173 - protein, 14 aa, synthetic construct
YCEGHSQEYLWKCL

SEQ ID NO: 174 - protein, 14 aa, synthetic construct
YCEGHSSEYIQKCL

SEQ ID NO: 175 - protein, 14 aa, synthetic construct
HCSGHHWLQVWKCF

SEQ ID NO: 176 - protein, 14 aa, synthetic construct
YCWSHSPPFIKKCY

SEQ ID NO: 177 - protein, 14 aa, synthetic construct
YCEGHLPEYRNKCL

SEQ ID NO: 178 - protein, 14 aa, synthetic construct
YCEGHLPEYLEKCV

SEQ ID NO: 179 - protein, 14 aa, synthetic construct
YCEGHLPEYIQKCL

SEQ ID NO: 180 - protein, 14 aa, synthetic construct
YCEGHLPEYIWKCL

SEQ ID NO: 181 - protein, 14 aa, synthetic construct
YCEGHAPEYIGKCL

SEQ ID NO: 182 - protein, 14 aa, synthetic construct
TCSAGATWPWPICL

SEQ ID NO: 183 - protein, 14 aa, synthetic construct
LCAAGASWPWPVCL

SEQ ID NO: 184 - protein, 14 aa, synthetic construct
TCSAGASYPWPLCL

SEQ ID NO: 185 - protein, 14 aa, synthetic construct
TCAAGAAWPWPQCL

SEQ ID NO: 186 - protein, 14 aa, synthetic construct
TCSAGATYTWPKCF

SEQ ID NO: 187 - protein, 14 aa, synthetic construct
TCAAGATWSWPACF

SEQ ID NO: 188 - protein, 14 aa, synthetic construct
TCAAGAAWGWPLCF

SEQ ID NO: 189 - protein, 14 aa, synthetic construct
LCAAGATYPWPLCL

SEQ ID NO: 190 - protein, 14 aa, synthetic construct
TCSAGAAYPWPLCL

SEQ ID NO: 191 - protein, 14 aa, synthetic construct
TCSAGAAYSWPACF

SEQ ID NO: 192 - protein, 14 aa, synthetic construct
LCAAGATYPWPTCL

SEQ ID NO: 193 - protein, 14 aa, synthetic construct
SCSAGAHYPWPQCF

SEQ ID NO: 194 - protein, 14 aa, synthetic construct
TCSAGATYEWPRCL

SEQ ID NO: 195 - protein, 14 aa, synthetic construct
TCSAGAHYPWPICL

SEQ ID NO: 196 - protein, 14 aa, synthetic construct
SCSAGAAYYWPWCL

SEQ ID NO: 197 - protein, 14 aa, synthetic construct
TCSAGATWAWPLCF

SEQ ID NO: 198 - protein, 14 aa, synthetic construct
TCAAGATYLWPTCL

SEQ ID NO: 199 - protein, 14 aa, synthetic construct
TCAAGAHYPWPACL

SEQ ID NO: 200 - protein, 14 aa, synthetic construct
LCAAGFTYPWPLCL

SEQ ID NO: 201 - protein, 14 aa, synthetic construct
LCKPGVPYKWPTCL

SEQ ID NO: 202 - protein, 214 aa, synthetic construct
DIQMTQSPSSLSASVGDRVTITCHASQNIYVWLNWYQQKPGKAPKLLIYKASNLHTGVPSRFSGSGSGTDFTLTISSLQPEDFATYYCQQGQTYPYTFGGGTKVEIKRTVAAPSVFIFPPSDEQLKSGTASVVCLLNNFYPREAKVQWKVDNALQSGNSQESVTEQDSKDSTYSLSSTLTLSKADYEKHKVYACEVTHQGLSSPVTKSFNRGEC

SEQ ID NO: 203 - protein, 223 aa, synthetic construct
QVQLVQSGAEVKKPGASVKVSCKASGYTFTSYYIHWVRQAPGQGLEWIGSIYPGNVNTNYNEKFKDRATLTVDTSISTAYMELSRLRSDDTAVYFCTRSHYGLDWNFDVWGQGTTVTVSSASTKGPSVFPLAPSSKSTSGGTAALGCLVKDYFPEPVTVSWNSGALTSGVHTFPAVLQSSGLYSLSSVVTVPSSSLGTQTYICNVNHKPSNTKVDKKVEPKSC

SEQ ID NO: 204 - protein, 14 aa, synthetic construct
YCDGHSPIYMWKCL

SEQ ID NO: 205 - protein, 14 aa, synthetic construct
YCEGHAPEYMAKCL

SEQ ID NO: 206 - protein, 14 aa, synthetic construct
YCDGHLPQYMEKCL

SEQ ID NO: 207 - protein, 14 aa, synthetic construct
YCAGHAPEYMEKCL

SEQ ID NO: 208 - protein, 14 aa, synthetic construct
YCDGHSPEYMWKCL

SEQ ID NO: 209 - protein, 14 aa, synthetic construct
YCDGHLPEYMEKCL

SEQ ID NO: 210 - protein, 14 aa, synthetic construct
YCEGHLPQYMWKCL

SEQ ID NO: 211 - protein, 14 aa, synthetic construct
YCDGHLPEYMNKCL

SEQ ID NO: 212 - protein, 14 aa, synthetic construct
YCAGHLPEYMDKCL

SEQ ID NO: 213 - protein, 14 aa, synthetic construct
YCDGHSAEHMAKCL

SEQ ID NO: 214 - protein, 14 aa, synthetic construct
YCAGHLPQYMAKCL

SEQ ID NO: 215 - protein, 14 aa, synthetic construct
YCEGHLPEYMAKCL

SEQ ID NO: 216 - protein, 14 aa, synthetic construct
YCEGHLPEYMFKCL

SEQ ID NO: 217 - protein, 14 aa, synthetic construct
YCDGHLPQYMAQCL

SEQ ID NO: 218 - protein, 14 aa, synthetic construct
YCEGHLPQYMQKCL

SEQ ID NO: 219 - protein, 14 aa, synthetic construct
YCDGHAPEYMMKCL

SEQ ID NO: 220 - protein, 14 aa, synthetic construct
YCEGHLPEYMWKCL

SEQ ID NO: 221 - protein, 14 aa, synthetic construct
YCEGHAAEYMAKCL

SEQ ID NO: 222 - protein, 14 aa, synthetic construct
YCDGHLPEYLAKCL

SEQ ID NO: 223 - protein, 14 aa, synthetic construct
YCAGHMPEYMAKCL

SEQ ID NO: 224 - protein, 14 aa, synthetic construct
YCDGHLPEYMSKCM

SEQ ID NO: 225 - protein, 14 aa, synthetic construct
YCEGHTAEYMQKCL

SEQ ID NO: 226 - protein, 14 aa, synthetic construct
YCMGHAPEYMAKCL

SEQ ID NO: 227 - protein, 14 aa, synthetic construct
YCDGHLPEYMAKCL

SEQ ID NO: 228 - protein, 14 aa, synthetic construct
YCDGHSWEYIGKCL

SEQ ID NO: 229 - protein, 14 aa, synthetic construct
YCDGHLPEYQEKCL

SEQ ID NO: 230 - protein, 14 aa, synthetic construct
YCAGHLPQYMSKCL

SEQ ID NO: 231 - protein, 14 aa, synthetic construct
YCDGHLPIYMSQCL

SEQ ID NO: 232 - protein, 14 aa, synthetic construct
YCEGHSPEYMAKCL

SEQ ID NO: 233 - protein, 14 aa, synthetic construct
YCDGHLPEYMSKCL

SEQ ID NO: 234 - protein, 14 aa, synthetic construct
YCDGHLPQYMAKCL

SEQ ID NO: 235 - protein, 14 aa, synthetic construct
YCQGHLPMYMAKCL

SEQ ID NO: 236 - protein, 14 aa, synthetic construct
YCDGHLPEYMMKCL

SEQ ID NO: 237 - protein, 14 aa, synthetic construct
YCDGHSPMYILKCL

SEQ ID NO: 238 - protein, 14 aa, synthetic construct
YCQGHLPMYMEKCL

SEQ ID NO: 239 - protein, 14 aa, synthetic construct
YCEGHLPQYMAKCL

SEQ ID NO: 240 - protein, 14 aa, synthetic construct
YCDGHSPLYMWKCL

SEQ ID NO: 241 - protein, 14 aa, synthetic construct
YCDGHLPMYMQKCL

SEQ ID NO: 242 - protein, 14 aa, synthetic construct
YCDGHLPIYMSKCL

SEQ ID NO: 243 - protein, 14 aa, synthetic construct
YCEGHSWANLGKCL

SEQ ID NO: 244 - protein, 14 aa, synthetic construct
YCDGHLPEYREKCF

SEQ ID NO: 245 - protein, 14 aa, synthetic construct
YCEGHLPEYMLKCL

SEQ ID NO: 246 - protein, 14 aa, synthetic construct
YCDGHEPQYMLKCL

SEQ ID NO: 247 - protein, 14 aa, synthetic construct
YCEGHSPEYMSKCL

SEQ ID NO: 248 - protein, 14 aa, synthetic construct
YCEGHTMEYMWKCL

SEQ ID NO: 249 - protein, 14 aa, synthetic construct
YCAGHLPEYMPHCI

SEQ ID NO: 250 - protein, 14 aa, synthetic construct
YCDGHSPQYIEKCL

SEQ ID NO: 251 - protein, 14 aa, synthetic construct
YCDGHSPEYILKCL

SEQ ID NO: 252 - protein, 14 aa, synthetic construct
YCDGHLDEYMAKCL

SEQ ID NO: 253 - protein, 14 aa, synthetic construct
YCDGHTLEYMWKCL

SEQ ID NO: 254 - protein, 14 aa, synthetic construct
YCEGHLPLYMWKCL

SEQ ID NO: 255 - protein, 14 aa, synthetic construct
YCDGHAPEYMAKCL

SEQ ID NO: 256 - protein, 14 aa, synthetic construct
YCAGHSPEHMWKCL

SEQ ID NO: 257 - protein, 14 aa, synthetic construct
YCEGHSEEYISKCL

SEQ ID NO: 258 - protein, 14 aa, synthetic construct
YCDGHLPIYMAKCL

SEQ ID NO: 259 - protein, 14 aa, synthetic construct
YCDGHAPQYMRKCL

SEQ ID NO: 260 - protein, 14 aa, synthetic construct
YCDGHAKEYMWKCL

SEQ ID NO: 261 - protein, 14 aa, synthetic construct
YCEGHSSEYMLKCL

SEQ ID NO: 262 - protein, 14 aa, synthetic construct
YCEGHAAEYMEKCL

SEQ ID NO: 263 - protein, 14 aa, synthetic construct
YCEGHSAQYMSKCL

SEQ ID NO: 264 - protein, 14 aa, synthetic construct
YCDGHSREYIAKCL

SEQ ID NO: 265 - protein, 14 aa, synthetic construct
YCDGHLPQYMWKCL

SEQ ID NO: 266 - protein, 14 aa, synthetic construct
YCDGHVPEYMAKCL

SEQ ID NO: 267 - protein, 14 aa, synthetic construct
YCDGHLPMYMMKCL

SEQ ID NO: 268 - protein, 14 aa, synthetic construct
YCQGHAPEYMAKCL

SEQ ID NO: 269 - protein, 14 aa, synthetic construct
YCDGHSQEYMMKCL

SEQ ID NO: 270 - protein, 14 aa, synthetic construct
YCSGHLPQYMQKCL

SEQ ID NO: 271 - protein, 14 aa, synthetic construct
YCDGHSSEYMAKCL

SEQ ID NO: 272 - protein, 14 aa, synthetic construct
YCDGHAPQYMQKCL

SEQ ID NO: 273 - protein, 14 aa, synthetic construct
YCEGHLPIYLEKCM

SEQ ID NO: 274 - protein, 14 aa, synthetic construct
YCEGHTPEYMQKCL

SEQ ID NO: 275 - protein, 14 aa, synthetic construct
YCDGHLPQYMMKCL

SEQ ID NO: 276 - protein, 14 aa, synthetic construct
YCDGHSTEYLWKCL

SEQ ID NO: 277 - protein, 14 aa, synthetic construct
YCEGHLGIYMYKCL

SEQ ID NO: 278 - protein, 14 aa, synthetic construct
YCDGHAAEYMAKCL

SEQ ID NO: 279 - protein, 14 aa, synthetic construct
YCEGHSQEYMSKCL

SEQ ID NO: 280 - protein, 14 aa, synthetic construct
YCDGHLPEYLWKCL

SEQ ID NO: 281 - protein, 14 aa, synthetic construct
YCEGHLPMYMEKCL

SEQ ID NO: 282 - protein, 14 aa, synthetic construct
YCDGHLSEYMEKCL

SEQ ID NO: 283 - protein, 14 aa, synthetic construct
YCEGHSPLYMWKCL

SEQ ID NO: 284 - protein, 14 aa, synthetic construct
YCEGHSPEYMEKCL

SEQ ID NO: 285 - protein, 14 aa, synthetic construct
YCAGHLPEYMEKCL

SEQ ID NO: 286 - protein, 14 aa, synthetic construct
YCEGHAWEYMAKCL

SEQ ID NO: 287 - protein, 14 aa, synthetic construct
YCQGHLPEYMNKCL

SEQ ID NO: 288 - protein, 14 aa, synthetic construct
YCDGHSQEYMAKCL

SEQ ID NO: 289 - protein, 14 aa, synthetic construct
YCQGHLPIYMEKCL

SEQ ID NO: 290 - protein, 14 aa, synthetic construct
YCDGHLPLYLAKCL

SEQ ID NO: 291 - protein, 14 aa, synthetic construct
YCDGHLPQYMNKCL

SEQ ID NO: 292 - protein, 14 aa, synthetic construct
YCEGHAPMYMWKCL

SEQ ID NO: 293 - protein, 14 aa, synthetic construct
YCEGHLPEYMQKCM

SEQ ID NO: 294 - protein, 14 aa, synthetic construct
YCDGHSAEYMAKCL

SEQ ID NO: 295 - protein, 14 aa, synthetic construct
YCEGHSPEYMYKCL

SEQ ID NO: 296 - protein, 14 aa, synthetic construct
YCDGHSMEYMSKCL

SEQ ID NO: 297 - protein, 14 aa, synthetic construct
YCEGHLPMYMDKCL

SEQ ID NO: 298 - protein, 14 aa, synthetic construct
YCDGHRGEYLQKCL

SEQ ID NO: 299 - protein, 14 aa, synthetic construct
YCEGHSPQYMWKCL

SEQ ID NO: 300 - protein, 14 aa, synthetic construct
YCEGHAAEYMTKCL

SEQ ID NO: 301 - protein, 14 aa, synthetic construct
YCEGHLPQYMKKCL

SEQ ID NO: 302 - protein, 14 aa, synthetic construct
YCDGHIEEYRAKCL

SEQ ID NO: 303 - protein, 14 aa, synthetic construct
YCEGHAPEYMLKCL

SEQ ID NO: 304 - protein, 14 aa, synthetic construct
YCDGHAPEYMEKCM

SEQ ID NO: 305 - protein, 14 aa, synthetic construct
YCEGHTVEYMAKCL

SEQ ID NO: 306 - protein, 14 aa, synthetic construct
YCDGHKAEYMDKCL

SEQ ID NO: 307 - protein, 14 aa, synthetic construct
YCDGHAPEYMLKCL

SEQ ID NO: 308 - protein, 14 aa, synthetic construct
YCDGHAPDYMLKCL

SEQ ID NO: 309 - protein, 14 aa, synthetic construct
YCDGHLPEYLPKCL

SEQ ID NO: 310 - protein, 14 aa, synthetic construct
YCDGHMPEYIAKCL

SEQ ID NO: 311 - protein, 14 aa, synthetic construct
YCDGHLPEYLSKCL

SEQ ID NO: 312 - protein, 14 aa, synthetic construct
YCAGHLPEYFLKCL

SEQ ID NO: 313 - protein, 14 aa, synthetic construct
YCDGHSPLYIWKCL

SEQ ID NO: 314 - protein, 14 aa, synthetic construct
YCDGHLPEYMHKCL

SEQ ID NO: 315 - protein, 14 aa, synthetic construct
YCDGHLPEYIEKCL

SEQ ID NO: 316 - protein, 14 aa, synthetic construct
YCDGHLPQYKAKCL

SEQ ID NO: 317 - protein, 14 aa, synthetic construct
YCDGHAVEYMAKCL

SEQ ID NO: 318 - protein, 14 aa, synthetic construct
YCDGHSIEYRWKCL

SEQ ID NO: 319 - protein, 14 aa, synthetic construct
YCEGHAEEYMQKCL

SEQ ID NO: 320 - protein, 14 aa, synthetic construct
YCDGHAPEYIYKCL

SEQ ID NO: 321 - protein, 14 aa, synthetic construct
YCDGHLEEYKQKCL

SEQ ID NO: 322 - protein, 14 aa, synthetic construct
YCMGHLPQYMQKCL

SEQ ID NO: 323 - protein, 14 aa, synthetic construct
YCDGHTQEYIAKCL

SEQ ID NO: 324 - protein, 14 aa, synthetic construct
YCDGHTQEYMAKCL

SEQ ID NO: 325 - protein, 14 aa, synthetic construct
YCEGHLPVYMWKCL

SEQ ID NO: 326 - protein, 14 aa, synthetic construct
YCDGHMPEYMWKCL

SEQ ID NO: 327 - protein, 14 aa, synthetic construct
YCAGHSPEYMTKCL

SEQ ID NO: 328 - protein, 14 aa, synthetic construct
YCAGHAPEYIQKCL

SEQ ID NO: 329 - protein, 14 aa, synthetic construct
YCDGHVAEYRDKCL

SEQ ID NO: 330 - protein, 14 aa, synthetic construct
YCAGHAPEYMQKCL

SEQ ID NO: 331 - protein, 14 aa, synthetic construct
YCDGHSNEYMAKCL

SEQ ID NO: 332 - protein, 14 aa, synthetic construct
YCEGHLPQYLQKCL

SEQ ID NO: 333 - protein, 14 aa, synthetic construct
YCDGHVAEYMAKCL

SEQ ID NO: 334 - protein, 14 aa, synthetic construct
YCDGHLPEYMWKCI

SEQ ID NO: 335 - protein, 14 aa, synthetic construct
YCDGHSAEYMWKCL

SEQ ID NO: 336 - protein, 14 aa, synthetic construct
YCDGHSLEYMAKCL

SEQ ID NO: 337 - protein, 14 aa, synthetic construct
YCEGHLPEYMSKCL

SEQ ID NO: 338 - protein, 14 aa, synthetic construct
YCAGHLPEYMQKCL

SEQ ID NO: 339 - protein, 14 aa, synthetic construct
YCDGHLGIYMWKCL

SEQ ID NO: 340 - protein, 14 aa, synthetic construct
YCEGHSAEYMAKCL

SEQ ID NO: 341 - protein, 14 aa, synthetic construct
YCDGHSDEYMAKCL

SEQ ID NO: 342 - protein, 14 aa, synthetic construct
YCEGHSLEYIGKCL

SEQ ID NO: 343 - protein, 14 aa, synthetic construct
YCDGHQPEYMAKCL

SEQ ID NO: 344 - protein, 14 aa, synthetic construct
YCAGHLPEYISKCL

SEQ ID NO: 345 - protein, 14 aa, synthetic construct
YCDGHIPIYMSKCL

SEQ ID NO: 346 - protein, 14 aa, synthetic construct
YCEGHLPQYLAKCL

SEQ ID NO: 347 - protein, 14 aa, synthetic construct
YCAGHLPLYMEKCL

SEQ ID NO: 348 - protein, 14 aa, synthetic construct
YCDGHSAEYMMKCL

SEQ ID NO: 349 - protein, 14 aa, synthetic construct
YCEGHLPQYIPKCL

SEQ ID NO: 350 - protein, 14 aa, synthetic construct
YCDGHAPQYMLKCL

SEQ ID NO: 351 - protein, 14 aa, synthetic construct
YCDGHLPVYMAKCL

SEQ ID NO: 352 - protein, 14 aa, synthetic construct
YCMGHSEEYMQKCL

SEQ ID NO: 353 - protein, 14 aa, synthetic construct
YCDGHLPEYMHKCL

SEQ ID NO: 354 - protein, 14 aa, synthetic construct
YCDGHLEEYMAKCL

SEQ ID NO: 355 - protein, 14 aa, synthetic construct
YCDGHMPEYMLKCL

SEQ ID NO: 356 - protein, 14 aa, synthetic construct
YCSGHAPIYMAKCL

SEQ ID NO: 357 - protein, 14 aa, synthetic construct
YCAGHTQEYMSKCL

SEQ ID NO: 358 - protein, 14 aa, synthetic construct
YCEGHSPQYMQKCL

SEQ ID NO: 359 - protein, 14 aa, synthetic construct
YCDGHVPQYMAKCL

SEQ ID NO: 360 - protein, 14 aa, synthetic construct
YCDGHSAEYMSKCL

SEQ ID NO: 361 - protein, 14 aa, synthetic construct
YCQGHLPQYIAKCL

SEQ ID NO: 362 - protein, 14 aa, synthetic construct
YCAGHLPQYMEKCM

SEQ ID NO: 363 - protein, 14 aa, synthetic construct
YCAGHLPEHIGKCL

SEQ ID NO: 364 - protein, 14 aa, synthetic construct
YCEGHTAEYLQKCL

SEQ ID NO: 365 - protein, 14 aa, synthetic construct
YCAGHSPEYMGKCM

SEQ ID NO: 366 - protein, 14 aa, synthetic construct
YCSGHLPEYMEKCL

SEQ ID NO: 367 - protein, 14 aa, synthetic construct
YCAGHLEIYMQKCL

SEQ ID NO: 368 - protein, 14 aa, synthetic construct
YCMGHLPQYMEKCL

SEQ ID NO: 369 - protein, 14 aa, synthetic construct
YCEGHSAEYMWKCL

SEQ ID NO: 370 - protein, 14 aa, synthetic construct
YCEGHAPEHMAKCL

SEQ ID NO: 371 - protein, 14 aa, synthetic construct
YCDGHAEQYMEKCL

SEQ ID NO: 372 - protein, 14 aa, synthetic construct
YCEGHSPEYMSHCF

SEQ ID NO: 373 - protein, 14 aa, synthetic construct
YCEGHSMQHMAKCL

SEQ ID NO: 374 - protein, 14 aa, synthetic construct
YCDGHAQEFMSKCL

SEQ ID NO: 375 - protein, 14 aa, synthetic construct
YCAGHLPEYIDKCL

SEQ ID NO: 376 - protein, 14 aa, synthetic construct
YCEGHAPQYIQKCL

SEQ ID NO: 377 - protein, 14 aa, synthetic construct
YCDGHELRYMAKCL

SEQ ID NO: 378 - protein, 14 aa, synthetic construct
YCDGHLPAYMAKCL

SEQ ID NO: 379 - protein, 14 aa, synthetic construct
YCEGHSDEYMLKCL

SEQ ID NO: 380 - protein, 14 aa, synthetic construct
YCEGHAPEYMMKCI

SEQ ID NO: 381 - protein, 14 aa, synthetic construct
YCEGHADIYMQKCL

SEQ ID NO: 382 - protein, 14 aa, synthetic construct
YCEGHSAEYMNKCL

SEQ ID NO: 383 - protein, 14 aa, synthetic construct
YCDGHAPQYMGKCL

SEQ ID NO: 384 - protein, 14 aa, synthetic construct
YCEGHLPIYMDKCL

SEQ ID NO: 385 - protein, 14 aa, synthetic construct
YCDGHAIEYMQKCL

SEQ ID NO: 386 - protein, 14 aa, synthetic construct
YCAGHIEEYMWKCL

SEQ ID NO: 387 - protein, 14 aa, synthetic construct
YCQGHMPEYMDKCL

SEQ ID NO: 388 - protein, 14 aa, synthetic construct
YCDGHAPEYVMKCL

SEQ ID NO: 389 - protein, 14 aa, synthetic construct
YCDGHVGEYMQKCL

SEQ ID NO: 390 - protein, 14 aa, synthetic construct
YCDGHSAQYMHKCL

SEQ ID NO: 391 - protein, 14 aa, synthetic construct
YCEGHAPEYMYKCL

SEQ ID NO: 392 - protein, 14 aa, synthetic construct
YCDGHLPEYQMKCL

SEQ ID NO: 393 - protein, 14 aa, synthetic construct
YCDGHASEYMMKCL

SEQ ID NO: 394 - protein, 14 aa, synthetic construct
YCDGHLIEYMEKCL

SEQ ID NO: 395 - protein, 14 aa, synthetic construct
YCEGHAIQYMSKCL

SEQ ID NO: 396 - protein, 14 aa, synthetic construct
YCEGHAPQHMDKCL

SEQ ID NO: 397 - protein, 14 aa, synthetic construct
YCEGHSPQYMSKCL

SEQ ID NO: 398 - protein, 14 aa, synthetic construct
YCDGHFREYMQKCL

SEQ ID NO: 399 - protein, 14 aa, synthetic construct
YCLGHAPQYIQKCL

SEQ ID NO: 400 - protein, 14 aa, synthetic construct
YCDGHSSEYMWKCL

SEQ ID NO: 401 - protein, 14 aa, synthetic construct
YCSGHLPEYMSKCL

SEQ ID NO: 402 - protein, 14 aa, synthetic construct
YCEGHAPQYIAKCL

SEQ ID NO: 403 - protein, 14 aa, synthetic construct
YCDGHSPMYIGKCL

SEQ ID NO: 404 - protein, 14 aa, synthetic construct
YCAGHLPEYMMKCL

SEQ ID NO: 405 - protein, 14 aa, synthetic construct
YCEGHRPEYMQKCL

SEQ ID NO: 406 - protein, 14 aa, synthetic construct
YCEGHAREHMAKCL

SEQ ID NO: 407 - protein, 14 aa, synthetic construct
YCEGHSPEYMTKCL

SEQ ID NO: 408 - protein, 14 aa, synthetic construct
YCEGHSIQYMAKCL

SEQ ID NO: 409 - protein, 14 aa, synthetic construct
YCEGHSLEYMGKCL

SEQ ID NO: 410 - protein, 14 aa, synthetic construct
YCDGHAPEYMEKCL

SEQ ID NO: 411 - protein, 14 aa, synthetic construct
YCDGHMGVYYWKCL

SEQ ID NO: 412 - protein, 14 aa, synthetic construct
YCDGHEAQYMSKCL

SEQ ID NO: 413 - protein, 14 aa, synthetic construct
YCDGHSHEYMEKCL

SEQ ID NO: 414 - protein, 14 aa, synthetic construct
YCQGHLPEYMSKCL

SEQ ID NO: 415 - protein, 14 aa, synthetic construct
YCEGHLSQYMQKCL

SEQ ID NO: 416 - protein, 14 aa, synthetic construct
YCDGHSPIYMSKCL

SEQ ID NO: 417 - protein, 14 aa, synthetic construct
YCDGHSDQYMWKCL

SEQ ID NO: 418 - protein, 14 aa, synthetic construct
YCDGHLPQYMSKCL

SEQ ID NO: 419 - protein, 14 aa, synthetic construct
YCEGHAAEYMMKCL

SEQ ID NO: 420 - protein, 14 aa, synthetic construct
YCAGHLPMYMHKCL

SEQ ID NO: 421 - protein, 14 aa, synthetic construct
YCDGHSQEYIAKCL

SEQ ID NO: 422 - protein, 14 aa, synthetic construct
YCDGHMPQYMSKCL

SEQ ID NO: 423 - protein, 14 aa, synthetic construct
YCVGHLPQYMEKCL

SEQ ID NO: 424 - protein, 14 aa, synthetic construct
YCDGHLGIYMTKCL

SEQ ID NO: 425 - protein, 14 aa, synthetic construct
YCDGHLWEYMDKCL

SEQ ID NO: 426 - protein, 14 aa, synthetic construct
YCEGHLPMYFLKCM

SEQ ID NO: 427 - protein, 14 aa, synthetic construct
YCDGHLPIYMTQCL

SEQ ID NO: 428 - protein, 14 aa, synthetic construct
YCEGHLAEYMDKCL

SEQ ID NO: 429 - protein, 14 aa, synthetic construct
YCDGHLEQYRAKCL

SEQ ID NO: 430 - protein, 14 aa, synthetic construct
YCDGHLPEYLGKCL

SEQ ID NO: 431 - protein, 14 aa, synthetic construct
YCAGHSVEYMAKCL

SEQ ID NO: 432 - protein, 14 aa, synthetic construct
YCDGHSALYMWKCL

SEQ ID NO: 433 - protein, 14 aa, synthetic construct
YCDGHSSEYMIKCL

SEQ ID NO: 434 - protein, 14 aa, synthetic construct
YCDGHLIEYMYKCL

SEQ ID NO: 435 - protein, 14 aa, synthetic construct
YCDGHSAEYMQKCL

SEQ ID NO: 436 - protein, 14 aa, synthetic construct
YCDGHLVEYMSKCL

SEQ ID NO: 437 - protein, 14 aa, synthetic construct
YCEGHLSQYMEKCL

SEQ ID NO: 438 - protein, 14 aa, synthetic construct
YCDGHSPEHIRKCL

SEQ ID NO: 439 - protein, 14 aa, synthetic construct
YCAGHLEIYMNKCL

SEQ ID NO: 440 - protein, 14 aa, synthetic construct
YCEGHLSEYMAKCL

SEQ ID NO: 441 - protein, 14 aa, synthetic construct
YCEGHLPIYLSKCL

SEQ ID NO: 442 - protein, 14 aa, synthetic construct
YCDGHASEYMWKCL

SEQ ID NO: 443 - protein, 14 aa, synthetic construct
YCSGHAPEYMAKCL

SEQ ID NO: 444 - protein, 14 aa, synthetic construct
YCEGHRAEYMEKCL

SEQ ID NO: 445 - protein, 14 aa, synthetic construct
YCDGHSPDYIWKCL

SEQ ID NO: 446 - protein, 14 aa, synthetic construct
YCMGHAPEYMEKCL

SEQ ID NO: 447 - protein, 14 aa, synthetic construct
YCMGHQPEYMQKCL

SEQ ID NO: 448 - protein, 14 aa, synthetic construct
YCDGHMPEYMEKCL

SEQ ID NO: 449 - protein, 14 aa, synthetic construct
YCDGHSAEYLAKCL

SEQ ID NO: 450 - protein, 14 aa, synthetic construct
YCDGHSPEYMTKCL

SEQ ID NO: 451 - protein, 14 aa, synthetic construct
YCEGHSMEYMAKCL

SEQ ID NO: 452 - protein, 14 aa, synthetic construct
YCAGHMPEYIDKCL

SEQ ID NO: 453 - protein, 14 aa, synthetic construct
YCAGHSPEFMEKCL

SEQ ID NO: 454 - protein, 14 aa, synthetic construct
YCDGHLNEYMEKCL

SEQ ID NO: 455 - protein, 14 aa, synthetic construct
YCDGHLKEYQEKCL

SEQ ID NO: 456 - protein, 14 aa, synthetic construct
YCEGHLAQYMWKCL

SEQ ID NO: 457 - protein, 14 aa, synthetic construct
YCEGHLAVYMQKCL

SEQ ID NO: 458 - protein, 14 aa, synthetic construct
YCEGHSSEYMEKCL

SEQ ID NO: 459 - protein, 14 aa, synthetic construct
YCDGHLDIYLAKCL

SEQ ID NO: 460 - protein, 14 aa, synthetic construct
YCEGHSEEYMSKCL

SEQ ID NO: 461 - protein, 14 aa, synthetic construct
YCDGHSQEYMWKCL

SEQ ID NO: 462 - protein, 14 aa, synthetic construct
YCDGHAPEYMKKCL

SEQ ID NO: 463 - protein, 14 aa, synthetic construct
YCDGHSKEYMHKCL

SEQ ID NO: 464 - protein, 14 aa, synthetic construct
YCDGHEPQYLEKCL

SEQ ID NO: 465 - protein, 14 aa, synthetic construct
YCDGHAEEYMSKCL

SEQ ID NO: 466 - protein, 14 aa, synthetic construct
YCDGHVEEYLYKCL

SEQ ID NO: 467 - protein, 14 aa, synthetic construct
YCAGHLEEYMDKCL

SEQ ID NO: 468 - protein, 14 aa, synthetic construct
YCAGHAPQYMEKCL

SEQ ID NO: 469 - protein, 14 aa, synthetic construct
YCAGHLPQYIAKCL

SEQ ID NO: 470 - protein, 14 aa, synthetic construct
YCDGHLKEYMAKCL

SEQ ID NO: 471 - protein, 14 aa, synthetic construct
YCDGHRPEYMEKCL

SEQ ID NO: 472 - protein, 14 aa, synthetic construct
YCDGHLPEYMGKCL

SEQ ID NO: 473 - protein, 14 aa, synthetic construct
YCEGHLQEYMEKCL

SEQ ID NO: 474 - protein, 14 aa, synthetic construct
YCEGHIPEYMAKCL

SEQ ID NO: 475 - protein, 14 aa, synthetic construct
YCDGHSPEYMPKCL

SEQ ID NO: 476 - protein, 14 aa, synthetic construct
YCDGHLAEYMPKCL

SEQ ID NO: 477 - protein, 14 aa, synthetic construct
YCEGHSPEYMWKCL

SEQ ID NO: 478 - protein, 14 aa, synthetic construct
YCDGHIDEYLQKCL

SEQ ID NO: 479 - protein, 14 aa, synthetic construct
YCEGHVAEYMLKCL

SEQ ID NO: 480 - protein, 14 aa, synthetic construct
YCEGHLSEYMSKCL

SEQ ID NO: 481 - protein, 14 aa, synthetic construct
YCEGHMSEYMAKCL

SEQ ID NO: 482 - protein, 14 aa, synthetic construct
YCDGHSWEYIQKCL

SEQ ID NO: 483 - protein, 14 aa, synthetic construct
YCEGHSLEYMAKCL

SEQ ID NO: 484 - protein, 14 aa, synthetic construct
YCEGHSYEYMWKCL

SEQ ID NO: 485 - protein, 14 aa, synthetic construct
YCEGHLPEYMMKCL

SEQ ID NO: 486 - protein, 14 aa, synthetic construct
YCDGHLPEYMRKCL

SEQ ID NO: 487 - protein, 14 aa, synthetic construct
YCEGHSPLYMSKCL

SEQ ID NO: 488 - protein, 14 aa, synthetic construct
YCEGHSWEYIGKCL

SEQ ID NO: 489 - protein, 14 aa, synthetic construct
YCDGHSALYMSKCL

SEQ ID NO: 490 - protein, 14 aa, synthetic construct
YCDGHTGVYFYKCL

SEQ ID NO: 491 - protein, 14 aa, synthetic construct
YCEGHTSEYMNKCL

SEQ ID NO: 492 - protein, 14 aa, synthetic construct
YCEGHRSEYMAKCL

SEQ ID NO: 493 - protein, 14 aa, synthetic construct
YCDGHLAMYMDKCL

SEQ ID NO: 494 - protein, 14 aa, synthetic construct
YCDGHMPEYLAKCL

SEQ ID NO: 495 - protein, 14 aa, synthetic construct
YCEGHAAEYMSKCL

SEQ ID NO: 496 - protein, 14 aa, synthetic construct
YCAGHSSEYMWKCL

SEQ ID NO: 497 - protein, 14 aa, synthetic construct
YCDGHSWAYMWKCL

SEQ ID NO: 498 - protein, 14 aa, synthetic construct
YCDGHSAAYIMKCL

SEQ ID NO: 499 - protein, 14 aa, synthetic construct
YCDGHSLQYLGKCL

SEQ ID NO: 500 - protein, 14 aa, synthetic construct
YCEGHSQEYMQKCL

SEQ ID NO: 501 - protein, 14 aa, synthetic construct
YCAGHLPEYLSKCL

SEQ ID NO: 502 - protein, 14 aa, synthetic construct
YCEGHLQIYMSKCL

SEQ ID NO: 503 - protein, 14 aa, synthetic construct
YCAGHAPEYMFKCM

SEQ ID NO: 504 - protein, 14 aa, synthetic construct
YCEGHRPEYMAKCL

SEQ ID NO: 505 - protein, 14 aa, synthetic construct
YCEGHLPEYMRKCL

SEQ ID NO: 506 - protein, 14 aa, synthetic construct
YCDGHSPAYMAKCL

SEQ ID NO: 507 - protein, 14 aa, synthetic construct
YCDGHLPMYFAKCM

SEQ ID NO: 508 - protein, 14 aa, synthetic construct
YCDGHSSEYIVKCL

SEQ ID NO: 509 - protein, 14 aa, synthetic construct
YCEGHAAEYMWKCL

SEQ ID NO: 510 - protein, 14 aa, synthetic construct
YCEGHSAEYIFKCL

SEQ ID NO: 511 - protein, 14 aa, synthetic construct
YCEGHSPMYMQKCM

SEQ ID NO: 512 - protein, 14 aa, synthetic construct
YCDGHSAEYMEKCI

SEQ ID NO: 513 - protein, 14 aa, synthetic construct
YCDGHLPLYMHKCL

SEQ ID NO: 514 - protein, 14 aa, synthetic construct
YCEGHAPQYLNKCL

SEQ ID NO: 515 - protein, 14 aa, synthetic construct
YCDGHAREYMTKCL

SEQ ID NO: 516 - protein, 14 aa, synthetic construct
YCDGHTEEYMDKCL

SEQ ID NO: 517 - protein, 14 aa, synthetic construct
YCDGHSSMYMAKCL

SEQ ID NO: 518 - protein, 14 aa, synthetic construct
YCAGHSSEYIWKCL

SEQ ID NO: 519 - protein, 14 aa, synthetic construct
YCEGHSAEFMTKCL

SEQ ID NO: 520 - protein, 14 aa, synthetic construct
YCQGHSAEYMMKCL

SEQ ID NO: 521 - protein, 14 aa, synthetic construct
YCAGHLPQYMNKCL

SEQ ID NO: 522 - protein, 14 aa, synthetic construct
YCDGHKAEYMEKCL

SEQ ID NO: 523 - protein, 14 aa, synthetic construct
YCAGHLPMYMAKCL

SEQ ID NO: 524 - protein, 14 aa, synthetic construct
YCDGHTREYIDKCL

SEQ ID NO: 525 - protein, 14 aa, synthetic construct
YCVGHAPEFMAKCL

SEQ ID NO: 526 - protein, 14 aa, synthetic construct
YCAGHAEQYMAKCL

SEQ ID NO: 527 - protein, 14 aa, synthetic construct
YCDGHLSEYMFKCL

SEQ ID NO: 528 - protein, 14 aa, synthetic construct
YCDGHLGVYMAKCL

SEQ ID NO: 529 - protein, 14 aa, synthetic construct
YCDGHTSEYITKCL

SEQ ID NO: 530 - protein, 14 aa, synthetic construct
YCDGHSPEYIAKCL

SEQ ID NO: 531 - protein, 14 aa, synthetic construct
YCDGHLAEYMVKCL

SEQ ID NO: 532 - protein, 14 aa, synthetic construct
YCDGHAPMYMAKCL

SEQ ID NO: 533 - protein, 14 aa, synthetic construct
YCEGHLPAYMQKCL

SEQ ID NO: 534 - protein, 14 aa, synthetic construct
YCEGHHPQYMAKCL

SEQ ID NO: 535 - protein, 14 aa, synthetic construct
YCAGHVPEYMAKCL

SEQ ID NO: 536 - protein, 14 aa, synthetic construct
YCDGHSAEYITKCL

SEQ ID NO: 537 - protein, 14 aa, synthetic construct
YCEGHLDEYMWKCL

SEQ ID NO: 538 - protein, 14 aa, synthetic construct
YCDGLASEYMSKCL

SEQ ID NO: 539 - protein, 14 aa, synthetic construct
YCDGHSSEYIAKCL

SEQ ID NO: 540 - protein, 14 aa, synthetic construct
YCEGHSPQYVQKCL

SEQ ID NO: 541 - protein, 14 aa, synthetic construct
YCEGHSPEYMRKCL

SEQ ID NO: 542 - protein, 14 aa, synthetic construct
YCDGHLDEYMEKCL

SEQ ID NO: 543 - protein, 14 aa, synthetic construct
YCAGHLPEYMLKCL

SEQ ID NO: 544 - protein, 14 aa, synthetic construct
YCEGHLPIYMSKCL

SEQ ID NO: 545 - protein, 14 aa, synthetic construct
YCVGHLQEYMEKCL

SEQ ID NO: 546 - protein, 14 aa, synthetic construct
YCDGHSPQYMQKCL

SEQ ID NO: 547 - protein, 14 aa, synthetic construct
YCDGHIPEYLAKCL

SEQ ID NO: 548 - protein, 14 aa, synthetic construct
YCDGHSQEYMLKCL

SEQ ID NO: 549 - protein, 14 aa, synthetic construct
YCDGHVEPYLSKCL

SEQ ID NO: 550 - protein, 14 aa, synthetic construct
YCDGHKPQYMEKCL

SEQ ID NO: 551 - protein, 14 aa, synthetic construct
YCDGHIGEYMVKCL

SEQ ID NO: 552 - protein, 14 aa, synthetic construct
YCEGHLAQYMNKCL

SEQ ID NO: 553 - protein, 14 aa, synthetic construct
YCDGHVQEYMQKCL

SEQ ID NO: 554 - protein, 14 aa, synthetic construct
YCHGHLQEYMAKCL

SEQ ID NO: 555 - protein, 14 aa, synthetic construct
YCDGHSPEYMNKCL

SEQ ID NO: 556 - protein, 14 aa, synthetic construct
YCDGHAPVYMAKCL

SEQ ID NO: 557 - protein, 14 aa, synthetic construct
YCEGHSAEYMLKCL

SEQ ID NO: 558 - protein, 14 aa, synthetic construct
YCDGHHIEYLAKCL

SEQ ID NO: 559 - protein, 14 aa, synthetic construct
YCSGHLPEYMQKCL

SEQ ID NO: 560 - protein, 14 aa, synthetic construct
YCEGHLPEYMQKCL

SEQ ID NO: 561 - protein, 14 aa, synthetic construct
YCDGHSLQYMDKCL

SEQ ID NO: 562 - protein, 14 aa, synthetic construct
YCDGHYPEYMSKCL

SEQ ID NO: 563 - protein, 14 aa, synthetic construct
YCDGHASEYMAKCL

SEQ ID NO: 564 - protein, 14 aa, synthetic construct
YCDGHAEKYMQKCL

SEQ ID NO: 565 - protein, 14 aa, synthetic construct
YCEGHAIEYLAKCL

SEQ ID NO: 566 - protein, 14 aa, synthetic construct
YCEGHSAEYMEKCL

SEQ ID NO: 567 - protein, 14 aa, synthetic construct
YCSGHSAEYMLKCL

SEQ ID NO: 568 - protein, 14 aa, synthetic construct
YCEGHLPDYMQKCL

SEQ ID NO: 569 - protein, 14 aa, synthetic construct
YCDGHLEEYMVKCM

SEQ ID NO: 570 - protein, 14 aa, synthetic construct
YCEGHLQTYMAKCL

SEQ ID NO: 571 - protein, 14 aa, synthetic construct
YCAGHSQEHIQKCL

SEQ ID NO: 572 - protein, 14 aa, synthetic construct
YCDGHLPEYIFKCL

SEQ ID NO: 573 - protein, 14 aa, synthetic construct
YCSGHLPEYMGKCL

SEQ ID NO: 574 - protein, 14 aa, synthetic construct
YCDGHAEEYLWKCL

SEQ ID NO: 575 - protein, 14 aa, synthetic construct
YCAGHSAEYMAKCL

SEQ ID NO: 576 - protein, 14 aa, synthetic construct
YCDGHSGVYMWKCL

SEQ ID NO: 577 - protein, 14 aa, synthetic construct
YCDGHTQAYIQKCL

SEQ ID NO: 578 - protein, 14 aa, synthetic construct
YCDGHAIQYIGKCL

SEQ ID NO: 579 - protein, 14 aa, synthetic construct
YCDGHAAEFMMKCL

SEQ ID NO: 580 - protein, 14 aa, synthetic construct
YCDGHLSEYMAKCL

SEQ ID NO: 581 - protein, 14 aa, synthetic construct
YCEGHSEMYMKKCL

SEQ ID NO: 582 - protein, 14 aa, synthetic construct
YCDGHLQIYLWKCL

SEQ ID NO: 583 - protein, 14 aa, synthetic construct
YCQGHLPVYMEKCL

SEQ ID NO: 584 - protein, 14 aa, synthetic construct
YCDGHAAEYMDKCL

SEQ ID NO: 585 - protein, 14 aa, synthetic construct
YCEGHSVQYMQKCL

SEQ ID NO: 586 - protein, 14 aa, synthetic construct
YCAGHLPEYLDKCL

SEQ ID NO: 587 - protein, 14 aa, synthetic construct
YCDGHSREYMVKCL

SEQ ID NO: 588 - protein, 14 aa, synthetic construct
YCDGHLVEYRGKCL

SEQ ID NO: 589 - protein, 14 aa, synthetic construct
YCAGHSAEYMWKCL

SEQ ID NO: 590 - protein, 14 aa, synthetic construct
YCDGHLQIYMHKCL

SEQ ID NO: 591 - protein, 14 aa, synthetic construct
YCAGHSMEYMAKCL

SEQ ID NO: 592 - protein, 14 aa, synthetic construct
YCDGHLPEYFLKCL

SEQ ID NO: 593 - protein, 14 aa, synthetic construct
YCDGHSLAYIAKCL

SEQ ID NO: 594 - protein, 14 aa, synthetic construct
YCAGHTQEYMYKCL

SEQ ID NO: 595 - protein, 14 aa, synthetic construct
YCEGHAQEYMSKCL

SEQ ID NO: 596 - protein, 14 aa, synthetic construct
YCEGHLPQYFMKCL

SEQ ID NO: 597 - protein, 14 aa, synthetic construct
YCDGHSWEYMEKCL

SEQ ID NO: 598 - protein, 14 aa, synthetic construct
YCAGHSPLYMLKCL

SEQ ID NO: 599 - protein, 14 aa, synthetic construct
YCEGHSAEYMQKCL

SEQ ID NO: 600 - protein, 14 aa, synthetic construct
YCDGHLPVYLEKCL

SEQ ID NO: 601 - protein, 14 aa, synthetic construct
YCAGHLQEYMQKCL

SEQ ID NO: 602 - protein, 14 aa, synthetic construct
YCDGHAIEYMAKCL

SEQ ID NO: 603 - protein, 14 aa, synthetic construct
YCEGHKPEYMQKCL

SEQ ID NO: 604 - protein, 14 aa, synthetic construct
YCDGHAWEYMTKCL

SEQ ID NO: 605 - protein, 14 aa, synthetic construct
YCEGHSPWYMNKCL

SEQ ID NO: 606 - protein, 14 aa, synthetic construct
YCDGHSPAYIWKCL

SEQ ID NO: 607 - protein, 14 aa, synthetic construct
YCDGHSEQYMSKCL

SEQ ID NO: 608 - protein, 14 aa, synthetic construct
YCDGHAKEYMDKCL

SEQ ID NO: 609 - protein, 14 aa, synthetic construct
YCDGHSTEYMEKCL

SEQ ID NO: 610 - protein, 14 aa, synthetic construct
YCDGHSSLYMHKCL

SEQ ID NO: 611 - protein, 14 aa, synthetic construct
YCDGHSWQYISKCL

SEQ ID NO: 612 - protein, 14 aa, synthetic construct
YCEGHAPQYMNKCL

SEQ ID NO: 613 - protein, 14 aa, synthetic construct
YCDGHAPQWMAKCL

SEQ ID NO: 614 - protein, 14 aa, synthetic construct
YCDGHSREYMSKCL

SEQ ID NO: 615 - protein, 14 aa, synthetic construct
YCDGHAAEYMAKCV

SEQ ID NO: 616 - protein, 14 aa, synthetic construct
YCEGHAQEYMNKCL

SEQ ID NO: 617 - protein, 14 aa, synthetic construct
YCEGHAPQYMTKCL

SEQ ID NO: 618 - protein, 14 aa, synthetic construct
YCDGHSADYMAKCL

SEQ ID NO: 619 - protein, 14 aa, synthetic construct
YCDGHIGLYLNKCL

SEQ ID NO: 620 - protein, 14 aa, synthetic construct
YCEGHLPMYMIKCL

SEQ ID NO: 621 - protein, 14 aa, synthetic construct
YCEGHLPQYMRPCL

SEQ ID NO: 622 - protein, 14 aa, synthetic construct
YCEGHLSQYMSKCL

SEQ ID NO: 623 - protein, 14 aa, synthetic construct
YCDGHSPEYIGKCL

SEQ ID NO: 624 - protein, 14 aa, synthetic construct
YCAGHLPEFMDKCL

SEQ ID NO: 625 - protein, 14 aa, synthetic construct
YCDGHSREYMNKCL

SEQ ID NO: 626 - protein, 14 aa, synthetic construct
YCDGHDVEYMAKCL

SEQ ID NO: 627 - protein, 14 aa, synthetic construct
YCDGHSEVYMAKCL

SEQ ID NO: 628 - protein, 14 aa, synthetic construct
YCDGHSLLYLSKCL

SEQ ID NO: 629 - protein, 14 aa, synthetic construct
YCEGHLAVYMEKCL

SEQ ID NO: 630 - protein, 14 aa, synthetic construct
YCEGHSLMYMWKCL

SEQ ID NO: 631 - protein, 14 aa, synthetic construct
YCAGHAAEYMTKCL

SEQ ID NO: 632 - protein, 14 aa, synthetic construct
YCDGHSVEYMEKCL

SEQ ID NO: 633 - protein, 14 aa, synthetic construct
YCDGHAQEYRLKCL

SEQ ID NO: 634 - protein, 14 aa, synthetic construct
YCDGHSAEYLLKCL

SEQ ID NO: 635 - protein, 14 aa, synthetic construct
YCDGHGPQYIQKCL

SEQ ID NO: 636 - protein, 14 aa, synthetic construct
YCEGHIAEYMQKCL

SEQ ID NO: 637 - protein, 14 aa, synthetic construct
YCEGHSAQYMHKCL

SEQ ID NO: 638 - protein, 14 aa, synthetic construct
YCEGHTAEHMQKCL

SEQ ID NO: 639 - protein, 14 aa, synthetic construct
YCAGHVAEYMAKCL

SEQ ID NO: 640 - protein, 14 aa, synthetic construct
YCDGHATEYMQKCL

SEQ ID NO: 641 - protein, 14 aa, synthetic construct
YCEGHMWEYMAKCL

SEQ ID NO: 642 - protein, 14 aa, synthetic construct
YCDGHDVEYMSKCL

SEQ ID NO: 643 - protein, 14 aa, synthetic construct
YCAGHSLEYMQKCL

SEQ ID NO: 644 - protein, 14 aa, synthetic construct
YCEGHDLIYMWKCL

SEQ ID NO: 645 - protein, 14 aa, synthetic construct
YCAGHAPEYMSKCL

SEQ ID NO: 646 - protein, 14 aa, synthetic construct
YCEGHSSEYMWKCL

SEQ ID NO: 647 - protein, 14 aa, synthetic construct
YCDGHLDVYRAKCL

SEQ ID NO: 648 - protein, 14 aa, synthetic construct
YCEGHLEQYMQKCL

SEQ ID NO: 649 - protein, 14 aa, synthetic construct
YCEGHSWVYMAKCL

SEQ ID NO: 650 - protein, 14 aa, synthetic construct
YCDGHSLEYIGKCL

SEQ ID NO: 651 - protein, 14 aa, synthetic construct
YCDGHSEAFMQKCL

SEQ ID NO: 652 - protein, 14 aa, synthetic construct
YCAGHLPEYMGKCL

SEQ ID NO: 653 - protein, 14 aa, synthetic construct
YCAGHLAIYMSKCL

SEQ ID NO: 654 - protein, 14 aa, synthetic construct
YCDGHLSEYMSKCL

SEQ ID NO: 655 - protein, 14 aa, synthetic construct
YCEGHVTEYMQKCL

SEQ ID NO: 656 - protein, 14 aa, synthetic construct
YCDGHAQEYMDKCL

SEQ ID NO: 657 - protein, 14 aa, synthetic construct
YCEGHAPQYIMKCL

SEQ ID NO: 658 - protein, 14 aa, synthetic construct
YCDGHELKYMLKCL

SEQ ID NO: 659 - protein, 14 aa, synthetic construct
YCDGHLLEYKAKCL

SEQ ID NO: 660 - protein, 14 aa, synthetic construct
YCEGHLEEYMAKCL

SEQ ID NO: 661 - protein, 14 aa, synthetic construct
YCDGHSPEYMLKCL

SEQ ID NO: 662 - protein, 14 aa, synthetic construct
YCAGHSPQYMEKCL

SEQ ID NO: 663 - protein, 14 aa, synthetic construct
YCDGHSVKYMAKCL

SEQ ID NO: 664 - protein, 14 aa, synthetic construct
YCSGHLPEYMWKCL

SEQ ID NO: 665 - protein, 14 aa, synthetic construct
YCDGHSVEYKLKCM

SEQ ID NO: 666 - protein, 14 aa, synthetic construct
YCDGHAQEYMVKCL

SEQ ID NO: 667 - protein, 14 aa, synthetic construct
YCAGHSPEYMQKCL

SEQ ID NO: 668 - protein, 14 aa, synthetic construct
YCEGHLPLYMDKCL

SEQ ID NO: 669 - protein, 14 aa, synthetic construct
YCEGHSAAYMQKCL

SEQ ID NO: 670 - protein, 14 aa, synthetic construct
YCEGHMPEYLQKCL

SEQ ID NO: 671 - protein, 14 aa, synthetic construct
YCDGHELQYMAKCL

SEQ ID NO: 672 - protein, 14 aa, synthetic construct
YCDGHRLEYLEKCL

SEQ ID NO: 673 - protein, 14 aa, synthetic construct
YCAGHLDQYIEKCL

SEQ ID NO: 674 - protein, 14 aa, synthetic construct
YCDGHAQEFIWKCL

SEQ ID NO: 675 - protein, 14 aa, synthetic construct
YCDGHSEAYMWKCL

SEQ ID NO: 676 - protein, 14 aa, synthetic construct
YCEGHADEYMWKCL

SEQ ID NO: 677 - protein, 14 aa, synthetic construct
YCEGHSVEYIGKCL

SEQ ID NO: 678 - protein, 14 aa, synthetic construct
YCDGHRVEYMAKCL

SEQ ID NO: 679 - protein, 14 aa, synthetic construct
YCEGHSWEHMEKCL

SEQ ID NO: 680 - protein, 14 aa, synthetic construct
YCAGHSSEYIPKCL

SEQ ID NO: 681 - protein, 14 aa, synthetic construct
YCDGHLPQYLQKCT

SEQ ID NO: 682 - protein, 14 aa, synthetic construct
YCDGHAKEYIQKCL

SEQ ID NO: 683 - protein, 14 aa, synthetic construct
YCEGHLPQYMVKCL

SEQ ID NO: 684 - protein, 14 aa, synthetic construct
YCQGHADEYMAKCL

SEQ ID NO: 685 - protein, 14 aa, synthetic construct
YCDGHAEEYLLKCL

SEQ ID NO: 686 - protein, 14 aa, synthetic construct
YCEGHLGIYMTKCL

SEQ ID NO: 687 - protein, 14 aa, synthetic construct
YCDGHSWQYMWKCI

SEQ ID NO: 688 - protein, 14 aa, synthetic construct
YCEGHSEEFMSKCL

SEQ ID NO: 689 - protein, 14 aa, synthetic construct
YCDGHLPMYMKKCL

SEQ ID NO: 690 - protein, 14 aa, synthetic construct
YCQGHLPQYVEKCL

SEQ ID NO: 691 - protein, 14 aa, synthetic construct
YCEGHLDMYVWKCL

SEQ ID NO: 692 - protein, 14 aa, synthetic construct
YCDGHSQEYMAHCL

SEQ ID NO: 693 - protein, 14 aa, synthetic construct
YCDGHSPLYMVKCL

SEQ ID NO: 694 - protein, 14 aa, synthetic construct
YCDGHFLTYMTKCL

SEQ ID NO: 695 - protein, 14 aa, synthetic construct
YCAGHSEEYMDKCL

SEQ ID NO: 696 - protein, 14 aa, synthetic construct
YCDGHSEVYMSKCL

SEQ ID NO: 697 - protein, 14 aa, synthetic construct
YCEGHTLEYMWKCL

SEQ ID NO: 698 - protein, 14 aa, synthetic construct
YCDGHSQAHMQKCL

SEQ ID NO: 699 - protein, 14 aa, synthetic construct
YCAGHDQQYMEKCL

SEQ ID NO: 700 - protein, 14 aa, synthetic construct
YCDGHLPVYMMKCL

SEQ ID NO: 701 - protein, 14 aa, synthetic construct
YCAGHNAQYMSKCL

SEQ ID NO: 702 - protein, 14 aa, synthetic construct
YCDGHTSEYMTKCL

SEQ ID NO: 703 - protein, 14 aa, synthetic construct
YCEGHAPVYMFKCL

SEQ ID NO: 704 - protein, 14 aa, synthetic construct
YCEGHLGQYMEKCL

SEQ ID NO: 705 - protein, 14 aa, synthetic construct
YCDGHNGVYWWKCI

SEQ ID NO: 706 - protein, 14 aa, synthetic construct
YCDGHAPEYLTKCL

SEQ ID NO: 707 - protein, 14 aa, synthetic construct
YCEGHSIQYMTKCL

SEQ ID NO: 708 - protein, 14 aa, synthetic construct
YCDGHLQIYMGKCL

SEQ ID NO: 709 - protein, 14 aa, synthetic construct
YCDGHSVEYLDKCL

SEQ ID NO: 710 - protein, 14 aa, synthetic construct
YCDGHAWQYMWKCL

SEQ ID NO: 711 - protein, 14 aa, synthetic construct
YCDGHLPEYLAKCL

SEQ ID NO: 712 - protein, 14 aa, synthetic construct
YCDGHLAVYMAKCL

SEQ ID NO: 713 - protein, 14 aa, synthetic construct
YCAGHLPVYMDKCL

SEQ ID NO: 714 - protein, 14 aa, synthetic construct
YCEGHSAMYIWKCL

SEQ ID NO: 715 - protein, 14 aa, synthetic construct
YCAGHLEEYMWKCL

SEQ ID NO: 716 - protein, 14 aa, synthetic construct
YCDGHSELYMAKCL

SEQ ID NO: 717 - protein, 14 aa, synthetic construct
YCDGHSAEYLSKCL

SEQ ID NO: 718 - protein, 14 aa, synthetic construct
YCEGHMPQYMEKCL

SEQ ID NO: 719 - protein, 14 aa, synthetic construct
YCEGHSLMYMAKCL

SEQ ID NO: 720 - protein, 14 aa, synthetic construct
YCDGHSQEYMEKCL

SEQ ID NO: 721 - protein, 14 aa, synthetic construct
YCDGHKAEYMQKCL

SEQ ID NO: 722 - protein, 14 aa, synthetic construct
YCDGHSPQYIQKCL

SEQ ID NO: 723 - protein, 14 aa, synthetic construct
YCSGHLPQYLEKCL

SEQ ID NO: 724 - protein, 14 aa, synthetic construct
YCDGHHKEYLLKCL

SEQ ID NO: 725 - protein, 14 aa, synthetic construct
YCDGHLALHMKKCL

SEQ ID NO: 726 - protein, 14 aa, synthetic construct
YCEGHIMQYMAQCL

SEQ ID NO: 727 - protein, 14 aa, synthetic construct
YCDGHLPIYQAKCL

SEQ ID NO: 728 - protein, 14 aa, synthetic construct
YCDGHSEQYIAKCL

SEQ ID NO: 729 - protein, 14 aa, synthetic construct
YCDGHLPEYITKCL

SEQ ID NO: 730 - protein, 14 aa, synthetic construct
YCEGHRPEYMQKCV

SEQ ID NO: 731 - protein, 14 aa, synthetic construct
YCAGHTVENMAKCL

SEQ ID NO: 732 - protein, 14 aa, synthetic construct
YCEGHVLEYRGKCD

SEQ ID NO: 733 - protein, 14 aa, synthetic construct
YCDGHVAEYRHKCL

SEQ ID NO: 734 - protein, 14 aa, synthetic construct
YCEGHLDQYMTKCL

SEQ ID NO: 735 - protein, 14 aa, synthetic construct
YCAGHTQEYIEKCL

SEQ ID NO: 736 - protein, 14 aa, synthetic construct
YCDGHLAIYIGKCL

SEQ ID NO: 737 - protein, 14 aa, synthetic construct
YCDGHLEIYMSKCL

SEQ ID NO: 738 - protein, 14 aa, synthetic construct
YCDGHLLEYMSKCL

SEQ ID NO: 739 - protein, 14 aa, synthetic construct
YCDGHSLEYMVKCL

SEQ ID NO: 740 - protein, 14 aa, synthetic construct
YCEGHSLEHIAKCL

SEQ ID NO: 741 - protein, 14 aa, synthetic construct
YCEGHTPVYMPKCL

SEQ ID NO: 742 - protein, 14 aa, synthetic construct
YCQGHIEPYLAKCL

SEQ ID NO: 743 - protein, 14 aa, synthetic construct
YCDGHLAIYMWKCL

SEQ ID NO: 744 - protein, 14 aa, synthetic construct
YCDGHAEEYMAKCL

SEQ ID NO: 745 - protein, 14 aa, synthetic construct
YCDGHSLQYMSKCL

SEQ ID NO: 746 - protein, 14 aa, synthetic construct
YCEGHLPQYMTKCI

SEQ ID NO: 747 - protein, 14 aa, synthetic construct
YCAGHLPQYIQKCL

SEQ ID NO: 748 - protein, 14 aa, synthetic construct
YCEGHLAIYQKKCL

SEQ ID NO: 749 - protein, 14 aa, synthetic construct
YCEGHAVEYMAKCL

SEQ ID NO: 750 - protein, 14 aa, synthetic construct
YCEGHLPIYMEKCL

SEQ ID NO: 751 - protein, 14 aa, synthetic construct
YCEGHSMEYIQKCL

SEQ ID NO: 752 - protein, 14 aa, synthetic construct
YCEGHSQEYMAKCL

SEQ ID NO: 753 - protein, 14 aa, synthetic construct
YCDGHLPEYMNQCL

SEQ ID NO: 754 - protein, 14 aa, synthetic construct
YCDGHNFQYMEKCL

SEQ ID NO: 755 - protein, 14 aa, synthetic construct
YCVGHLPQYMQKCL

SEQ ID NO: 756 - protein, 14 aa, synthetic construct
YCDGHLPEYIAKCQ

SEQ ID NO: 757 - protein, 14 aa, synthetic construct
YCDGHSLEYIEKCL

SEQ ID NO: 758 - protein, 14 aa, synthetic construct
YCLGHSWPYIHKCY

SEQ ID NO: 759 - protein, 14 aa, synthetic construct
YCDGHLDEYMLKCL

SEQ ID NO: 760 - protein, 14 aa, synthetic construct
YCDGHTPEYMWKCL

SEQ ID NO: 761 - protein, 14 aa, synthetic construct
YCEGHSQQYMQKCL

SEQ ID NO: 762 - protein, 14 aa, synthetic construct
YCDGHSPAFIQKCL

SEQ ID NO: 763 - protein, 14 aa, synthetic construct
YCDGHSLEYIDKCM

SEQ ID NO: 764 - protein, 14 aa, synthetic construct
YCQGHSPNYITKCF

SEQ ID NO: 765 - protein, 14 aa, synthetic construct
YCDGHAPEYLGKCL

SEQ ID NO: 766 - protein, 14 aa, synthetic construct
YCAGHAEEYLEKCL

SEQ ID NO: 767 - protein, 14 aa, synthetic construct
YCDGHSHEYMQKCL

SEQ ID NO: 768 - protein, 14 aa, synthetic construct
YCAGHSAEYMSKCL

SEQ ID NO: 769 - protein, 14 aa, synthetic construct
YCDGHLMEYKAKCL

SEQ ID NO: 770 - protein, 14 aa, synthetic construct
YCEGHSAEYIAKCL

SEQ ID NO: 771 - protein, 14 aa, synthetic construct
YCDGHSPEHMGKCL

SEQ ID NO: 772 - protein, 14 aa, synthetic construct
YCDGHDARYMEKCL

SEQ ID NO: 773 - protein, 14 aa, synthetic construct
YCDGHSPEYMQKCL

SEQ ID NO: 774 - protein, 14 aa, synthetic construct
YCNGHLPEYMSKCI

SEQ ID NO: 775 - protein, 14 aa, synthetic construct
YCSGHLPEYMDKCL

SEQ ID NO: 776 - protein, 14 aa, synthetic construct
YCDGHSLEYMLKCL

SEQ ID NO: 777 - protein, 14 aa, synthetic construct
YCEGHHPWYVQKCL

SEQ ID NO: 778 - protein, 14 aa, synthetic construct
YCDGHNWEYMEKCL

SEQ ID NO: 779 - protein, 14 aa, synthetic construct
YCDGHAEQYMSKCL

SEQ ID NO: 780 - protein, 14 aa, synthetic construct
YCDGLFQLYMMKCL

SEQ ID NO: 781 - protein, 14 aa, synthetic construct
YCDGHAPEYIQKCL

SEQ ID NO: 782 - protein, 14 aa, synthetic construct
YCEGHLDEYLQKCL

SEQ ID NO: 783 - protein, 14 aa, synthetic construct
YCDGHLQEYMQKCL

SEQ ID NO: 784 - protein, 14 aa, synthetic construct
YCDGHQPQYMSKCL

SEQ ID NO: 785 - protein, 14 aa, synthetic construct
YCDGHLSEYIGKCL

SEQ ID NO: 786 - protein, 14 aa, synthetic construct
YCEGHSQLYMAKCL

SEQ ID NO: 787 - protein, 14 aa, synthetic construct
YCDGHSETYLWKCL

SEQ ID NO: 788 - protein, 14 aa, synthetic construct
YCEGHLPAYMGKCI

SEQ ID NO: 789 - protein, 14 aa, synthetic construct
YCEGHLPEYMIKCI

SEQ ID NO: 790 - protein, 14 aa, synthetic construct
YCAGHTSEYMSKCL

SEQ ID NO: 791 - protein, 14 aa, synthetic construct
YCDGHMKEYMLKCL

SEQ ID NO: 792 - protein, 14 aa, synthetic construct
YCDGHVKEYMYKCL

SEQ ID NO: 793 - protein, 14 aa, synthetic construct
YCDGHLALYMWKCL

SEQ ID NO: 794 - protein, 14 aa, synthetic construct
YCDGHLSIYMTKCL

SEQ ID NO: 795 - protein, 14 aa, synthetic construct
YCDGHMVQYMAKCL

SEQ ID NO: 796 - protein, 14 aa, synthetic construct
YCDGHSEEFMWKCL

SEQ ID NO: 797 - protein, 14 aa, synthetic construct
YCEGHMEKYMEKCL

SEQ ID NO: 798 - protein, 14 aa, synthetic construct
YCDGHLPRYMAKCL

SEQ ID NO: 799 - protein, 14 aa, synthetic construct
YCDGHLPEYMQKCL

SEQ ID NO: 800 - protein, 14 aa, synthetic construct
YCDGHLLQYMHKCL

SEQ ID NO: 801 - protein, 14 aa, synthetic construct
YCDGHAPLYIQKCL

SEQ ID NO: 802 - protein, 14 aa, synthetic construct
YCDGHSKEYMAKCL

SEQ ID NO: 803 - protein, 14 aa, synthetic construct
YCEGHSPEYMHKCL

SEQ ID NO: 804 - protein, 14 aa, synthetic construct
YCDGHSEAYIEKCL

SEQ ID NO: 805 - protein, 14 aa, synthetic construct
YCAGHVDQYLWKCL

SEQ ID NO: 806 - protein, 14 aa, synthetic construct
YCAGHASEYMAKCL

SEQ ID NO: 807 - protein, 14 aa, synthetic construct
YCDGHAPQYMRKCL

SEQ ID NO: 808 - protein, 14 aa, synthetic construct
YCDGHLPLYMQKCF

SEQ ID NO: 809 - protein, 14 aa, synthetic construct
YCAGHLPMYMQKCL

SEQ ID NO: 810 - protein, 14 aa, synthetic construct
YCSEHQIIFIQKCL

SEQ ID NO: 811 - protein, 14 aa, synthetic construct
YCEGHLEIYLAKCL

SEQ ID NO: 812 - protein, 14 aa, synthetic construct
YCDGHTAEFIGKCL

SEQ ID NO: 813 - protein, 14 aa, synthetic construct
YCAGHALEYMGKCL

SEQ ID NO: 814 - protein, 14 aa, synthetic construct
YCEGHLPEYMIKCL

SEQ ID NO: 815 - protein, 14 aa, synthetic construct
YCEGHLPAYMWKCL

SEQ ID NO: 816 - protein, 14 aa, synthetic construct
YCEGHLPMYMQKCL

SEQ ID NO: 817 - protein, 14 aa, synthetic construct
YCDGHIPEYMTKCL

SEQ ID NO: 818 - protein, 14 aa, synthetic construct
YCDGHSAEYIAKCL

SEQ ID NO: 819 - protein, 14 aa, synthetic construct
YCEGHSAVYMSKCL

SEQ ID NO: 820 - protein, 14 aa, synthetic construct
YCEGHSLEYMMKCV

SEQ ID NO: 821 - protein, 14 aa, synthetic construct
YCDGHAPQYMAKCI

SEQ ID NO: 822 - protein, 14 aa, synthetic construct
YCQGHSVEHMAKCL

SEQ ID NO: 823 - protein, 14 aa, synthetic construct
YCAGHMPIYMTKCL

SEQ ID NO: 824 - protein, 14 aa, synthetic construct
YCDGHRAEYMLKCL

SEQ ID NO: 825 - protein, 14 aa, synthetic construct
YCEGHLVQYMQKCL

SEQ ID NO: 826 - protein, 14 aa, synthetic construct
YCMGHLPIYMEKCL

SEQ ID NO: 827 - protein, 14 aa, synthetic construct
YCEGHLPRYMLKCL

SEQ ID NO: 828 - protein, 14 aa, synthetic construct
YCDGHLEVYMDKCL

SEQ ID NO: 829 - protein, 14 aa, synthetic construct
YCDGHSPAYLQKCL

SEQ ID NO: 830 - protein, 14 aa, synthetic construct
YCEGHSSQWMWKCL

SEQ ID NO: 831 - protein, 14 aa, synthetic construct
YCEGHFPLYMNKCL

SEQ ID NO: 832 - protein, 14 aa, synthetic construct
YCEGHSTEYMAKCL

SEQ ID NO: 833 - protein, 14 aa, synthetic construct
YCEGHQPAYMEKCL

SEQ ID NO: 834 - protein, 14 aa, synthetic construct
YCDGHAEEYRMKCL

SEQ ID NO: 835 - protein, 14 aa, synthetic construct
YCDGHLPVYMTKCL

SEQ ID NO: 836 - protein, 14 aa, synthetic construct
YCDGHSSVYMLKCL

SEQ ID NO: 837 - protein, 14 aa, synthetic construct
YCEGHHRIYMQKCL

SEQ ID NO: 838 - protein, 14 aa, synthetic construct
YCEGHSEEYMAKCL

SEQ ID NO: 839 - protein, 14 aa, synthetic construct
YCEGHMSIYMQKCL

SEQ ID NO: 840 - protein, 14 aa, synthetic construct
YCEGHLQEHMAKCL

SEQ ID NO: 841 - protein, 14 aa, synthetic construct
YCAGLFEEYMSKCL

SEQ ID NO: 842 - protein, 14 aa, synthetic construct
YCEGHLPMYMTKCL

SEQ ID NO: 843 - protein, 14 aa, synthetic construct
YCDGHSEQYMAKCL

SEQ ID NO: 844 - protein, 14 aa, synthetic construct
YCEGHTQEYMQKCL

SEQ ID NO: 845 - protein, 14 aa, synthetic construct
YCAGHTAEYMAKCL

SEQ ID NO: 846 - protein, 14 aa, synthetic construct
YCEGHLAEYMNKCL

SEQ ID NO: 847 - protein, 14 aa, synthetic construct
YCDGHVEEYMTKCL

SEQ ID NO: 848 - protein, 14 aa, synthetic construct
YCDGHLEQYMLKCL

SEQ ID NO: 849 - protein, 14 aa, synthetic construct
YCEGHIGIYMSKCL

SEQ ID NO: 850 - protein, 14 aa, synthetic construct
YCEGHSTEYIQKCL

SEQ ID NO: 851 - protein, 14 aa, synthetic construct
YCDGHSMMYMQKCL

SEQ ID NO: 852 - protein, 14 aa, synthetic construct
YCEGHSAEHMPKCL

SEQ ID NO: 853 - protein, 14 aa, synthetic construct
YCVGHYPEYMEKCL

SEQ ID NO: 854 - protein, 14 aa, synthetic construct
YCDGHEARYMQKCL

SEQ ID NO: 855 - protein, 14 aa, synthetic construct
YCDGHSQEYMSKCL

SEQ ID NO: 856 - protein, 14 aa, synthetic construct
YCHGHLPQYMSKCM

SEQ ID NO: 857 - protein, 14 aa, synthetic construct
YCAGHLDIYLAKCL

SEQ ID NO: 858 - protein, 14 aa, synthetic construct
YCAGHAPEYISKCL

SEQ ID NO: 859 - protein, 14 aa, synthetic construct
YCDGHSWEYLGKCL

SEQ ID NO: 860 - protein, 14 aa, synthetic construct
YCEGHAAEYLWKCL

SEQ ID NO: 861 - protein, 14 aa, synthetic construct
YCDGHRPEYMSKCL

SEQ ID NO: 862 - protein, 14 aa, synthetic construct
YCEGHMPEYLAKCL

SEQ ID NO: 863 - protein, 14 aa, synthetic construct
YCEGHAGVYMAKCL

SEQ ID NO: 864 - protein, 14 aa, synthetic construct
YCEGHSQTYMWKCL

SEQ ID NO: 865 - protein, 14 aa, synthetic construct
YCAGHSSEYIGKCL

SEQ ID NO: 866 - protein, 14 aa, synthetic construct
YCEGHSQQYMWKCL

SEQ ID NO: 867 - protein, 14 aa, synthetic construct
YCDGHLPDYMAKCL

SEQ ID NO: 868 - protein, 14 aa, synthetic construct
YCEGHAEQYMEKCL

SEQ ID NO: 869 - protein, 14 aa, synthetic construct
YCEGHLKEYMQKCL

SEQ ID NO: 870 - protein, 14 aa, synthetic construct
YCEGHSYQYMQKCL

SEQ ID NO: 871 - protein, 14 aa, synthetic construct
YCEGHRAEYMSKCL

SEQ ID NO: 872 - protein, 14 aa, synthetic construct
YCDGHSWIYMVKCL

SEQ ID NO: 873 - protein, 14 aa, synthetic construct
YCDGHLSVYMSKCL

SEQ ID NO: 874 - protein, 14 aa, synthetic construct
YCEGHLPQYMSKCL

SEQ ID NO: 875 - protein, 14 aa, synthetic construct
YCEGHVAEYRAKCL

SEQ ID NO: 876 - protein, 14 aa, synthetic construct
YCQGHLPQYIEKCL

SEQ ID NO: 877 - protein, 14 aa, synthetic construct
YCEGHAAAYMGKCL

SEQ ID NO: 878 - protein, 14 aa, synthetic construct
YCDGHEQQYMEKCL

SEQ ID NO: 879 - protein, 14 aa, synthetic construct
YCDGHLQMYMMKCL

SEQ ID NO: 880 - protein, 14 aa, synthetic construct
YCEGHLYEYMWKCL

SEQ ID NO: 881 - protein, 14 aa, synthetic construct
YCVGHSEQYMAKCL

SEQ ID NO: 882 - protein, 14 aa, synthetic construct
YCDGHEAEYMWKCL

SEQ ID NO: 883 - protein, 14 aa, synthetic construct
YCEGHAEQYMKKCL

SEQ ID NO: 884 - protein, 14 aa, synthetic construct
YCDGHVVEYMSKCL

SEQ ID NO: 885 - protein, 14 aa, synthetic construct
YCAGHLPQYMHKCL

SEQ ID NO: 886 - protein, 14 aa, synthetic construct
YCDGHIWPWIEKCL

SEQ ID NO: 887 - protein, 14 aa, synthetic construct
YCEGHSSLYLEKCL

SEQ ID NO: 888 - protein, 14 aa, synthetic construct
YCDGHAMEYMEKCL

SEQ ID NO: 889 - protein, 14 aa, synthetic construct
YCEGHLWEYLAKCL

SEQ ID NO: 890 - protein, 14 aa, synthetic construct
YCEGHMGEYMLKCL

SEQ ID NO: 891 - protein, 14 aa, synthetic construct
YCDGHTKEYMWKCL

SEQ ID NO: 892 - protein, 14 aa, synthetic construct
YCAGHAEEYMLKCL

SEQ ID NO: 893 - protein, 14 aa, synthetic construct
YCEGHSAEYIGKCL

SEQ ID NO: 894 - protein, 14 aa, synthetic construct
YCVGHLPEYMLECM

SEQ ID NO: 895 - protein, 14 aa, synthetic construct
YCDGHSFHYMAKCL

SEQ ID NO: 896 - protein, 14 aa, synthetic construct
YCEGHSEMYMSKCL

SEQ ID NO: 897 - protein, 14 aa, synthetic construct
YCDGHANAYIWKCL

SEQ ID NO: 898 - protein, 14 aa, synthetic construct
YCEGHIPMYMLKCM

SEQ ID NO: 899 - protein, 14 aa, synthetic construct
YCEGHAQEYMAKCL

SEQ ID NO: 900 - protein, 14 aa, synthetic construct
YCDGHAKVYIWKCL

SEQ ID NO: 901 - protein, 14 aa, synthetic construct
YCEGHIPAYMAKCL

SEQ ID NO: 902 - protein, 14 aa, synthetic construct
YCDGHAPIYMQKCL

SEQ ID NO: 903 - protein, 14 aa, synthetic construct
YCEGHLWEYMKKCL

SEQ ID NO: 904 - protein, 14 aa, synthetic construct
YCEGHDVQYMQKCL

SEQ ID NO: 905 - protein, 14 aa, synthetic construct
YCEGHSSEYLGKCL

SEQ ID NO: 906 - protein, 14 aa, synthetic construct
YCDGHLPRYMEKCM

SEQ ID NO: 907 - protein, 14 aa, synthetic construct
YCDGHSSAYIDKCL

SEQ ID NO: 908 - protein, 14 aa, synthetic construct
YCEGHLPSYLAKCL

SEQ ID NO: 909 - protein, 14 aa, synthetic construct
YCDGHAPEFIRKCL

SEQ ID NO: 910 - protein, 14 aa, synthetic construct
YCEGHAPQYMSKCL

SEQ ID NO: 911 - protein, 14 aa, synthetic construct
YCDGHDARYMTKCL

SEQ ID NO: 912 - protein, 14 aa, synthetic construct
YCEGHSVEYILKCL

SEQ ID NO: 913 - protein, 14 aa, synthetic construct
YCEGHSSAYMRKCL

SEQ ID NO: 914 - protein, 14 aa, synthetic construct
YCDGHLAEYIQKCL

SEQ ID NO: 915 - protein, 14 aa, synthetic construct
YCAGHSSEYLQKCL

SEQ ID NO: 916 - protein, 14 aa, synthetic construct
YCAGHSQVYMWKCL

SEQ ID NO: 917 - protein, 14 aa, synthetic construct
YCEGHIEQYMRKCL

SEQ ID NO: 918 - protein, 14 aa, synthetic construct
YCFGHAPEYLLKCL

SEQ ID NO: 919 - protein, 14 aa, synthetic construct
YCEGHLREYMLKCL

SEQ ID NO: 920 - protein, 14 aa, synthetic construct
YCEGHSSVYLWKCL

SEQ ID NO: 921 - protein, 14 aa, synthetic construct
YCEGHSWIYIAKCL

SEQ ID NO: 922 - protein, 14 aa, synthetic construct
YCDGHLEVYMSKCL

SEQ ID NO: 923 - protein, 14 aa, synthetic construct
YCEGHRPEYMANCL

SEQ ID NO: 924 - protein, 14 aa, synthetic construct
YCEGHIEPYMQKCL

SEQ ID NO: 925 - protein, 14 aa, synthetic construct
YCDGHKPEYMDKCL

SEQ ID NO: 926 - protein, 14 aa, synthetic construct
YCDGHVGAYMWKCL

SEQ ID NO: 927 - protein, 14 aa, synthetic construct
YCEGHSAIYIAKCM

SEQ ID NO: 928 - protein, 14 aa, synthetic construct
YCFGHFPEYMAKCL

SEQ ID NO: 929 - protein, 14 aa, synthetic construct
YCDGHTGMYISKCL

SEQ ID NO: 930 - protein, 14 aa, synthetic construct
YCSGHSWAYIGKCL

SEQ ID NO: 931 - protein, 14 aa, synthetic construct
YCAGHAAEYMWKCL

SEQ ID NO: 932 - protein, 14 aa, synthetic construct
YCQGHFPQYMAKCL

SEQ ID NO: 933 - protein, 14 aa, synthetic construct
YCEGHVPEYLVKCL

SEQ ID NO: 934 - protein, 14 aa, synthetic construct
YCDGHSKEYMSKCL

SEQ ID NO: 935 - protein, 14 aa, synthetic construct
YCDGHLPEYMLKCL

SEQ ID NO: 936 - protein, 14 aa, synthetic construct
YCAGHLDVYMSKCL

SEQ ID NO: 937 - protein, 14 aa, synthetic construct
YCAGHTPEYLDKCL

SEQ ID NO: 938 - protein, 14 aa, synthetic construct
YCEGHDIRYMMKCL

SEQ ID NO: 939 - protein, 14 aa, synthetic construct
YCDGHEERYMAKCL

SEQ ID NO: 940 - protein, 14 aa, synthetic construct
YCSGHVPEYMEKCL

SEQ ID NO: 941 - protein, 14 aa, synthetic construct
YCDGHIPQYVEKCL

SEQ ID NO: 942 - protein, 14 aa, synthetic construct
YCAGHAEIYMQKCL

SEQ ID NO: 943 - protein, 14 aa, synthetic construct
YCEGHAHEYMEKCV

SEQ ID NO: 944 - protein, 14 aa, synthetic construct
YCDGHHAEYMWKCL

SEQ ID NO: 945 - protein, 14 aa, synthetic construct
YCEGHTQAYLAKCL

SEQ ID NO: 946 - protein, 14 aa, synthetic construct
YCAGHSAQYMWKCL

SEQ ID NO: 947 - protein, 14 aa, synthetic construct
YCDGHSFEYMAKCL

SEQ ID NO: 948 - protein, 14 aa, synthetic construct
YCDGHSAEYLGKCL

SEQ ID NO: 949 - protein, 14 aa, synthetic construct
YCVGHSPEYIWKCL

SEQ ID NO: 950 - protein, 14 aa, synthetic construct
YCDGHELMYMEKCL

SEQ ID NO: 951 - protein, 14 aa, synthetic construct
YCAGHLEMYMSKCL

SEQ ID NO: 952 - protein, 14 aa, synthetic construct
YCDGHIKEYMSKCL

SEQ ID NO: 953 - protein, 14 aa, synthetic construct
YCDGHLLMYMEKCL

SEQ ID NO: 954 - protein, 14 aa, synthetic construct
YCEGHDWMYMEKCL

SEQ ID NO: 955 - protein, 14 aa, synthetic construct
YCEGHSQEYKAKCF

SEQ ID NO: 956 - protein, 14 aa, synthetic construct
YCDGHVLMYLAKCL

SEQ ID NO: 957 - protein, 14 aa, synthetic construct
YCEGHSSAYMAKCL

SEQ ID NO: 958 - protein, 14 aa, synthetic construct
YCEGHLAAYMYKCL

SEQ ID NO: 959 - protein, 14 aa, synthetic construct
YCDGHSTLYMQKCL

SEQ ID NO: 960 - protein, 14 aa, synthetic construct
YCDGHTEAYMSKCL

SEQ ID NO: 961 - protein, 14 aa, synthetic construct
YCEGHISEYMGKCL

SEQ ID NO: 962 - protein, 14 aa, synthetic construct
YCDGHFTWYMAKCL

SEQ ID NO: 963 - protein, 14 aa, synthetic construct
YCDGHIAEYRSKCL

SEQ ID NO: 964 - protein, 14 aa, synthetic construct
YCEGHLSEYIGKCL

SEQ ID NO: 965 - protein, 14 aa, synthetic construct
YCDGHTAQYMWKCL

SEQ ID NO: 966 - protein, 14 aa, synthetic construct
YCAGHSLQYLGKCY

SEQ ID NO: 967 - protein, 14 aa, synthetic construct
YCAGHAAIYMAKCL

SEQ ID NO: 968 - protein, 14 aa, synthetic construct
YCDGHSMTYMAKCI

SEQ ID NO: 969 - protein, 14 aa, synthetic construct
YCDGHKWEYLQKCL

SEQ ID NO: 970 - protein, 14 aa, synthetic construct
YCDGHDPQYIRKCI

SEQ ID NO: 971 - protein, 14 aa, synthetic construct
YCEGHLPMYMQKCM

SEQ ID NO: 972 - protein, 14 aa, synthetic construct
YCDGHSGEYMSKCL

SEQ ID NO: 973 - protein, 14 aa, synthetic construct
YCEGHAREYMDKCL

SEQ ID NO: 974 - protein, 14 aa, synthetic construct
YCDGHSMEYMAKCL

SEQ ID NO: 975 - protein, 14 aa, synthetic construct
YCDGHSPQYLWKCL

SEQ ID NO: 976 - protein, 14 aa, synthetic construct
YCAGHSAEYIQKCL

SEQ ID NO: 977 - protein, 14 aa, synthetic construct
YCAGHTQEYMLKCL

SEQ ID NO: 978 - protein, 14 aa, synthetic construct
YCQGHSVQYMAKCL

SEQ ID NO: 979 - protein, 14 aa, synthetic construct
YCEGHSSEYMVKCL

SEQ ID NO: 980 - protein, 14 aa, synthetic construct
YCDGHTGVYKWKCI

SEQ ID NO: 981 - protein, 14 aa, synthetic construct
YCAGHIGEYMDKCL

SEQ ID NO: 982 - protein, 14 aa, synthetic construct
YCDGHAGIYVLKCL

SEQ ID NO: 983 - protein, 14 aa, synthetic construct
YCDGHNPVYLAKCL

SEQ ID NO: 984 - protein, 14 aa, synthetic construct
YCEGHAQQYMLKCL

SEQ ID NO: 985 - protein, 14 aa, synthetic construct
YCAGHSVQYMYKCL

SEQ ID NO: 986 - protein, 14 aa, synthetic construct
YCEGHFGMYMSKCL

SEQ ID NO: 987 - protein, 14 aa, synthetic construct
YCAGHMPQYMSKCL

SEQ ID NO: 988 - protein, 14 aa, synthetic construct
YCQGHALQYLQKCL

SEQ ID NO: 989 - protein, 14 aa, synthetic construct
YCAGHLPQYVSKCL

SEQ ID NO: 990 - protein, 14 aa, synthetic construct
YCEGHLPWYMSKCL

SEQ ID NO: 991 - protein, 14 aa, synthetic construct
YCDGHHLEYIDKCL

SEQ ID NO: 992 - protein, 14 aa, synthetic construct
YCDGHLPRFMVKCL

SEQ ID NO: 993 - protein, 14 aa, synthetic construct
YCQGHAPWYMVKCL

SEQ ID NO: 994 - protein, 14 aa, synthetic construct
YCEGHMSEYMRKCL

SEQ ID NO: 995 - protein, 14 aa, synthetic construct
YCVGHLPLYMPNCL

SEQ ID NO: 996 - protein, 14 aa, synthetic construct
YCDGHEPQYMTKCL

SEQ ID NO: 997 - protein, 14 aa, synthetic construct
YCEGHLPQYLAKCY

SEQ ID NO: 998 - protein, 14 aa, synthetic construct
YCDGHYGAYILKCL

SEQ ID NO: 999 - protein, 14 aa, synthetic construct
YCEGHAAVYMHKCL

SEQ ID NO: 1000 - protein, 14 aa, synthetic construct
YCDGHMDAYMSKCL

SEQ ID NO: 1001 - protein, 14 aa, synthetic construct
YCMGHSAEYMGKCL

SEQ ID NO: 1002 - protein, 14 aa, synthetic construct
YCDGHAWWYMEKCL

SEQ ID NO: 1003 - protein, 14 aa, synthetic construct
YCDGHAAWYLQKCL

SEQ ID NO: 1004 - protein, 14 aa, synthetic construct
YCEGHAQMYMLKCL

SEQ ID NO: 1005 - protein, 14 aa, synthetic construct
YCEGHSRQYMEKCM

SEQ ID NO: 1006 - protein, 14 aa, synthetic construct
YCSGHLPMYMAKCL

SEQ ID NO: 1007 - protein, 14 aa, synthetic construct
YCEGHLAVHMSKCL

SEQ ID NO: 1008 - protein, 14 aa, synthetic construct
YCDGHIEMYMSKCM

SEQ ID NO: 1009 - protein, 14 aa, synthetic construct
YCAGHALEYMQKCM

SEQ ID NO: 1010 - protein, 14 aa, synthetic construct
YCEGHIGDYIAKCL

SEQ ID NO: 1011 - protein, 14 aa, synthetic construct
YCQGHSELYMSKCL

SEQ ID NO: 1012 - protein, 14 aa, synthetic construct
YCDGHTPQFRAKCL

SEQ ID NO: 1013 - protein, 14 aa, synthetic construct
YCEGHLQEYMGKCL

SEQ ID NO: 1014 - protein, 14 aa, synthetic construct
YCDGHVTEYMAKCL

SEQ ID NO: 1015 - protein, 14 aa, synthetic construct
YCDGHIMPYLDKCL

SEQ ID NO: 1016 - protein, 14 aa, synthetic construct
YCEGHKKEYMLKCL

SEQ ID NO: 1017 - protein, 14 aa, synthetic construct
YCEGHVELYRQKCL

SEQ ID NO: 1018 - protein, 14 aa, synthetic construct
YCDGHLETYMQKCL

SEQ ID NO: 1019 - protein, 14 aa, synthetic construct
YCQGHLPIYIQKCL

SEQ ID NO: 1020 - protein, 14 aa, synthetic construct
YCEGHLDEYLQKCM

SEQ ID NO: 1021 - protein, 14 aa, synthetic construct
YCAGHTTEYIVKCL

SEQ ID NO: 1022 - protein, 14 aa, synthetic construct
YCEGHVPQYMGKCL

SEQ ID NO: 1023 - protein, 14 aa, synthetic construct
YCDGHAAMYMSKCL

SEQ ID NO: 1024 - protein, 14 aa, synthetic construct
YCEGHLGLYMKKCL

SEQ ID NO: 1025 - protein, 14 aa, synthetic construct
YCAGHAQEYMRKCL

SEQ ID NO: 1026 - protein, 14 aa, synthetic construct
YCAGHIPQYLNKCL

SEQ ID NO: 1027 - protein, 14 aa, synthetic construct
YCDGHSTEYMWKCL

SEQ ID NO: 1028 - protein, 14 aa, synthetic construct
YCEGHIKDYMTKCL

SEQ ID NO: 1029 - protein, 14 aa, synthetic construct
YCAGHDAEYMQKCL

SEQ ID NO: 1030 - protein, 14 aa, synthetic construct
YCEGHMQWYMAKCL

SEQ ID NO: 1031 - protein, 14 aa, synthetic construct
YCEGHAPVYMQKCL

SEQ ID NO: 1032 - protein, 14 aa, synthetic construct
YCDGHDEQYLMKCL

SEQ ID NO: 1033 - protein, 14 aa, synthetic construct
YCDGHLPEYMEKCL

SEQ ID NO: 1034 - protein, 14 aa, synthetic construct
YCAGHASEYLQKCL

SEQ ID NO: 1035 - protein, 14 aa, synthetic construct
YCDGHSQIYMSKCL

SEQ ID NO: 1036 - protein, 14 aa, synthetic construct
YCDGHWPGYLWKCL

SEQ ID NO: 1037 - protein, 14 aa, synthetic construct
YCTGWQVAYMQNCF

SEQ ID NO: 1038 - protein, 14 aa, synthetic construct
YCAGHLDEYMEKCL

SEQ ID NO: 1039 - protein, 14 aa, synthetic construct
YCDGHTWMYKQKCL

SEQ ID NO: 1040 - protein, 14 aa, synthetic construct
TCSAGATWPWPICL

SEQ ID NO: 1041 - protein, 14 aa, synthetic construct
LCSAGAMWPWPTCL

SEQ ID NO: 1042 - protein, 14 aa, synthetic construct
LCSAGAMYSWPTCL

SEQ ID NO: 1043 - protein, 14 aa, synthetic construct
TCSAGATWPWPICL

SEQ ID NO: 1044 - protein, 14 aa, synthetic construct
TCAAGAMWAWPVCL

SEQ ID NO: 1045 - protein, 14 aa, synthetic construct
MCSAGAMYKWPLCL

SEQ ID NO: 1046 - protein, 14 aa, synthetic construct
TCSAGATYAWPFCL

SEQ ID NO: 1047 - protein, 14 aa, synthetic construct
MCAAGATYPWPACL

SEQ ID NO: 1048 - protein, 14 aa, synthetic construct
SCAAGAMWPWPVCV

SEQ ID NO: 1049 - protein, 14 aa, synthetic construct
TCSAGASYPWPLCL

SEQ ID NO: 1050 - protein, 14 aa, synthetic construct
SCKPGVANYWPWCL

SEQ ID NO: 1051 - protein, 14 aa, synthetic construct
MCSAGAMYSWPLCL

SEQ ID NO: 1052 - protein, 14 aa, synthetic construct
LCAAGATYPWPFCL

SEQ ID NO: 1053 - protein, 14 aa, synthetic construct
MCAAGANYPWPQCL

SEQ ID NO: 1054 - protein, 14 aa, synthetic construct
TCSAGATWSWPMCL

SEQ ID NO: 1055 - protein, 14 aa, synthetic construct
LCSAGAMYPWPTCL

SEQ ID NO: 1056 - protein, 14 aa, synthetic construct
TCAAGAHYSWPACF

SEQ ID NO: 1057 - protein, 14 aa, synthetic construct
TCAAGATYPWPSCL

SEQ ID NO: 1058 - protein, 14 aa, synthetic construct
RCAAGASYPWPPCL

SEQ ID NO: 1059 - protein, 14 aa, synthetic construct
TCKAGATYLWPFCL

SEQ ID NO: 1060 - protein, 14 aa, synthetic construct
MCAAGFHYPWPACL

SEQ ID NO: 1061 - protein, 14 aa, synthetic construct
TCAAGANWEWPWCF

SEQ ID NO: 1062 - protein, 14 aa, synthetic construct
TCAAGATYAWPYCV

SEQ ID NO: 1063 - protein, 14 aa, synthetic construct
TCAAGAAYPWPLCF

SEQ ID NO: 1064 - protein, 14 aa, synthetic construct
TCSAGASNKLSLCL

SEQ ID NO: 1065 - protein, 14 aa, synthetic construct
MCSAGANWPWPLCF

SEQ ID NO: 1066 - protein, 14 aa, synthetic construct
RCSAGFHYPLSLCL

SEQ ID NO: 1067 - protein, 14 aa, synthetic construct
NCSAGATYPWPLCL

SEQ ID NO: 1068 - protein, 14 aa, synthetic construct
SCAAGAMYSWPTCL

SEQ ID NO: 1069 - protein, 14 aa, synthetic construct
NCSAGAQWPWPICL

SEQ ID NO: 1070 - protein, 14 aa, synthetic construct
LCAAGAHYPWPQCL

SEQ ID NO: 1071 - protein, 14 aa, synthetic construct
TCAAGAHWPWPTCF

SEQ ID NO: 1072 - protein, 14 aa, synthetic construct
TCSAGATYTWSKCF

SEQ ID NO: 1073 - protein, 14 aa, synthetic construct
LCNAGATYSWPTCL

SEQ ID NO: 1074 - protein, 14 aa, synthetic construct
TCSAGATYTWPWCF

SEQ ID NO: 1075 - protein, 14 aa, synthetic construct
WCKPGAPYKWPPCF

SEQ ID NO: 1076 - protein, 14 aa, synthetic construct
TCAAGAMYTWPLCF

SEQ ID NO: 1077 - protein, 14 aa, synthetic construct
TCSAGATWTWPQCL

SEQ ID NO: 1078 - protein, 14 aa, synthetic construct
LCAAGATYAWPLCL

SEQ ID NO: 1079 - protein, 14 aa, synthetic construct
MCAEFFNYPWPLCL

SEQ ID NO: 1080 - protein, 14 aa, synthetic construct
TCAAGATYEWPACL

SEQ ID NO: 1081 - protein, 14 aa, synthetic construct
TCSAGAYYTWPYCF

SEQ ID NO: 1082 - protein, 14 aa, synthetic construct
TCAAVFSYGWPECF

SEQ ID NO: 1083 - protein, 14 aa, synthetic construct
SCSAGAMYTWPTCL

SEQ ID NO: 1084 - protein, 14 aa, synthetic construct
QCAAGASYPWPMCL

SEQ ID NO: 1085 - protein, 14 aa, synthetic construct
YCAAGATYPWPLCL

SEQ ID NO: 1086 - protein, 14 aa, synthetic construct
TCAAGATYAWPECL

SEQ ID NO: 1087 - protein, 14 aa, synthetic construct
TCSEGATYTWPWCF

SEQ ID NO: 1088 - protein, 14 aa, synthetic construct
TCAAGAHYLWPWCM

SEQ ID NO: 1089 - protein, 14 aa, synthetic construct
TCSAGATYVWPQCF

SEQ ID NO: 1090 - protein, 14 aa, synthetic construct
GCAAGATYPWPSCL

SEQ ID NO: 1091 - protein, 14 aa, synthetic construct
TCAAGATYKWPACL

SEQ ID NO: 1092 - protein, 14 aa, synthetic construct
MCSAGAMYPWPTCL

SEQ ID NO: 1093 - protein, 14 aa, synthetic construct
TCAAGASYAWPWCL

SEQ ID NO: 1094 - protein, 14 aa, synthetic construct
TCSAGASWAWPWCF

SEQ ID NO: 1095 - protein, 14 aa, synthetic construct
TCAAGAMWHWPVCL

SEQ ID NO: 1096 - protein, 14 aa, synthetic construct
TCSAGFHYEWPRCL

SEQ ID NO: 1097 - protein, 14 aa, synthetic construct
LCAAGFKYPWPLCL

SEQ ID NO: 1098 - protein, 14 aa, synthetic construct
LCEEFADYPWPMCL

SEQ ID NO: 1099 - protein, 14 aa, synthetic construct
TCAAGATYSWPMCF

SEQ ID NO: 1100 - protein, 14 aa, synthetic construct
LCAAGASYPWPTCL

SEQ ID NO: 1101 - protein, 14 aa, synthetic construct
HCAAGAHYPWPACL

SEQ ID NO: 1102 - protein, 14 aa, synthetic construct
TCAAGANYPWPYCL

SEQ ID NO: 1103 - protein, 14 aa, synthetic construct
MCAAGATYPWPLCL

SEQ ID NO: 1104 - protein, 14 aa, synthetic construct
TCAAGATYSWPWCF

SEQ ID NO: 1105 - protein, 14 aa, synthetic construct
TCAAGAHYTWPECF

SEQ ID NO: 1106 - protein, 14 aa, synthetic construct
SCAAVFSYSWPMCF

SEQ ID NO: 1107 - protein, 14 aa, synthetic construct
SCAAGATYSWPMCL

SEQ ID NO: 1108 - protein, 14 aa, synthetic construct
LCAEFFNYPWPLCL

SEQ ID NO: 1109 - protein, 14 aa, synthetic construct
QCSAGAAWPWPFCL

SEQ ID NO: 1110 - protein, 14 aa, synthetic construct
MCAAGAHYTWPTCL

SEQ ID NO: 1111 - protein, 14 aa, synthetic construct
TCSAGATYEWPWCM

SEQ ID NO: 1112 - protein, 14 aa, synthetic construct
MCSAGANYPWPWCL

SEQ ID NO: 1113 - protein, 14 aa, synthetic construct
TCAAGATYEWPYCF

SEQ ID NO: 1114 - protein, 14 aa, synthetic construct
WCAAVFSYTWSPCL

SEQ ID NO: 1115 - protein, 14 aa, synthetic construct
TCAAGAAYTWPACF

SEQ ID NO: 1116 - protein, 14 aa, synthetic construct
TCAAGATYEWPTCL

SEQ ID NO: 1117 - protein, 14 aa, synthetic construct
LCKPGVPNSWPTCL

SEQ ID NO: 1118 - protein, 14 aa, synthetic construct
TCSAGAHYPWPDCI

SEQ ID NO: 1119 - protein, 14 aa, synthetic construct
PCAAGAMWPWPVCL

SEQ ID NO: 1120 - protein, 14 aa, synthetic construct
LCNAGAMYKWPTCL

SEQ ID NO: 1121 - protein, 14 aa, synthetic construct
MCSAGAMYPWPLCL

SEQ ID NO: 1122 - protein, 14 aa, synthetic construct
TCSAGAMWTWPYCF

SEQ ID NO: 1123 - protein, 14 aa, synthetic construct
TCAAGAYWTWPACF

SEQ ID NO: 1124 - protein, 14 aa, synthetic construct
TCSAGAGYPWPLCY

SEQ ID NO: 1125 - protein, 14 aa, synthetic construct
SCSAGASLQLSICL

SEQ ID NO: 1126 - protein, 14 aa, synthetic construct
TCSAGATWAWPSCF

SEQ ID NO: 1127 - protein, 14 aa, synthetic construct
TCSAGAHYVWPMCF

SEQ ID NO: 1128 - protein, 14 aa, synthetic construct
TCSAGATYIWPMCF

SEQ ID NO: 1129 - protein, 14 aa, synthetic construct
TCRAGATYNWPFCL

SEQ ID NO: 1130 - protein, 14 aa, synthetic construct
TCSAGATWPWPICL

SEQ ID NO: 1131 - protein, 14 aa, synthetic construct
TCAAGASYPWPACL

SEQ ID NO: 1132 - protein, 14 aa, synthetic construct
SCAAVFSFPWSPCL

SEQ ID NO: 1133 - protein, 14 aa, synthetic construct
TCSAGFSYSWPACF

SEQ ID NO: 1134 - protein, 14 aa, synthetic construct
TCTAGFSYNWPMCF

SEQ ID NO: 1135 - protein, 14 aa, synthetic construct
TCSAGATYAWPACY

SEQ ID NO: 1136 - protein, 14 aa, synthetic construct
TCSAGATYSWPQCL

SEQ ID NO: 1137 - protein, 14 aa, synthetic construct
TCSAGAYYAWPVCL

SEQ ID NO: 1138 - protein, 14 aa, synthetic construct
LCRAGAMWPWPTCL

SEQ ID NO: 1139 - protein, 14 aa, synthetic construct
TCSAGATFHWPQCF

SEQ ID NO: 1140 - protein, 14 aa, synthetic construct
TCSAGAHYEWPYCL

SEQ ID NO: 1141 - protein, 14 aa, synthetic construct
QCAAGASYPWPVCL

SEQ ID NO: 1142 - protein, 14 aa, synthetic construct
LCKPGVPYQWPTCF

SEQ ID NO: 1143 - protein, 14 aa, synthetic construct
TCAAGAMWQWPVCL

SEQ ID NO: 1144 - protein, 14 aa, synthetic construct
PCSAGATYAWLYCV

SEQ ID NO: 1145 - protein, 14 aa, synthetic construct
SCAAGAMWPWPVCV

SEQ ID NO: 1146 - protein, 14 aa, synthetic construct
SCAAGAAYPWPACL

SEQ ID NO: 1147 - protein, 14 aa, synthetic construct
YCSAGAQWPWPICL

SEQ ID NO: 1148 - protein, 14 aa, synthetic construct
TCAAGASYQWPLCF

SEQ ID NO: 1149 - protein, 14 aa, synthetic construct
SCAAGASYSWPACF

SEQ ID NO: 1150 - protein, 14 aa, synthetic construct
SCSAGFHYPWPICL

SEQ ID NO: 1151 - protein, 14 aa, synthetic construct
LCKPGVPYQWPTCL

SEQ ID NO: 1152 - protein, 14 aa, synthetic construct
MCTAGALYNWPTCL

SEQ ID NO: 1153 - protein, 14 aa, synthetic construct
TCAAGAHYPWPYCL

SEQ ID NO: 1154 - protein, 14 aa, synthetic construct
WCAEFFNYHWPLCF

SEQ ID NO: 1155 - protein, 14 aa, synthetic construct
TCSAGFSLQLSICL

SEQ ID NO: 1156 - protein, 14 aa, synthetic construct
SCAAGASYPWPQCL

SEQ ID NO: 1157 - protein, 14 aa, synthetic construct
LCTAGLAYNWPTCL

SEQ ID NO: 1158 - protein, 14 aa, synthetic construct
GCAAGAHYPWPFCL

SEQ ID NO: 1159 - protein, 14 aa, synthetic construct
TCAAGAVWEWPMCF

SEQ ID NO: 1160 - protein, 14 aa, synthetic construct
TCAAGANYPWPLCL

SEQ ID NO: 1161 - protein, 14 aa, synthetic construct
MCAAGAMYAWPTCL

SEQ ID NO: 1162 - protein, 14 aa, synthetic construct
TCAAGASFPWPWCL

SEQ ID NO: 1163 - protein, 14 aa, synthetic construct
SCAAVFPYPWPPCF

SEQ ID NO: 1164 - protein, 14 aa, synthetic construct
TCSAGAMYPWPWCV

SEQ ID NO: 1165 - protein, 14 aa, synthetic construct
WCAAVFSYSWPLCL

SEQ ID NO: 1166 - protein, 14 aa, synthetic construct
GCAAGFHYPWPLCL

SEQ ID NO: 1167 - protein, 14 aa, synthetic construct
LCEEFFHYSWPVCL

SEQ ID NO: 1168 - protein, 14 aa, synthetic construct
TCAAGAAWPWPHCL

SEQ ID NO: 1169 - protein, 14 aa, synthetic construct
QCAAGAMWTWPACF

SEQ ID NO: 1170 - protein, 14 aa, synthetic construct
MCSAGATYPWPMCL

SEQ ID NO: 1171 - protein, 14 aa, synthetic construct
TCAAGATYPWPSCL

SEQ ID NO: 1172 - protein, 14 aa, synthetic construct
TCAAGAVWGWPLCF

SEQ ID NO: 1173 - protein, 14 aa, synthetic construct
TCAAGAHYAWPECF

SEQ ID NO: 1174 - protein, 14 aa, synthetic construct
RCRAGFSYNWPYCM

SEQ ID NO: 1175 - protein, 14 aa, synthetic construct
WCAAGATWPWPLCI

SEQ ID NO: 1176 - protein, 14 aa, synthetic construct
RCAAGVMYDWPVCL

SEQ ID NO: 1177 - protein, 14 aa, synthetic construct
TCSAGAHWTWPLCF

SEQ ID NO: 1178 - protein, 14 aa, synthetic construct
TCSAGAHFAWPMCF

SEQ ID NO: 1179 - protein, 14 aa, synthetic construct
SCAAGAHYVWPFCF

SEQ ID NO: 1180 - protein, 14 aa, synthetic construct
TCSAGATYNWPWCF

SEQ ID NO: 1181 - protein, 14 aa, synthetic construct
TCSAGASYPWPVCL

SEQ ID NO: 1182 - protein, 14 aa, synthetic construct
WCAAGAMYPWPLCL

SEQ ID NO: 1183 - protein, 14 aa, synthetic construct
LCNAGAPYKWPTCL

SEQ ID NO: 1184 - protein, 14 aa, synthetic construct
LCSAGAMYPWPLCY

SEQ ID NO: 1185 - protein, 14 aa, synthetic construct
TCAAGAMWVWPTCL

SEQ ID NO: 1186 - protein, 14 aa, synthetic construct
LCAAGANYPWPACL

SEQ ID NO: 1187 - protein, 14 aa, synthetic construct
SCAAGATYTWPMCI

SEQ ID NO: 1188 - protein, 14 aa, synthetic construct
SCAAGLSYPWPDCL

SEQ ID NO: 1189 - protein, 14 aa, synthetic construct
TCAAGAGWAWPFCF

SEQ ID NO: 1190 - protein, 14 aa, synthetic construct
MCSAGATYPWPYCL

SEQ ID NO: 1191 - protein, 14 aa, synthetic construct
LCSAGATYPWPWCM

SEQ ID NO: 1192 - protein, 14 aa, synthetic construct
DCWGDAPYPWRVCL

SEQ ID NO: 1193 - protein, 14 aa, synthetic construct
WCTAGFSYKLSICL

SEQ ID NO: 1194 - protein, 14 aa, synthetic construct
LCSAGAMYQWPTCL

SEQ ID NO: 1195 - protein, 14 aa, synthetic construct
TCSAGANYEWPWCF

SEQ ID NO: 1196 - protein, 14 aa, synthetic construct
TCAAGAHYEWPMCY

SEQ ID NO: 1197 - protein, 14 aa, synthetic construct
SCSAVFSYAWPTCL

SEQ ID NO: 1198 - protein, 14 aa, synthetic construct
TCAAGATWPWPSCL

SEQ ID NO: 1199 - protein, 14 aa, synthetic construct
TCAAGAHWIWPWCE

SEQ ID NO: 1200 - protein, 14 aa, synthetic construct
TCAAGAGWQWPMCF

SEQ ID NO: 1201 - protein, 14 aa, synthetic construct
SCAAGATYEWPRCL

SEQ ID NO: 1202 - protein, 14 aa, synthetic construct
GCAAGANYPWPLCL

SEQ ID NO: 1203 - protein, 14 aa, synthetic construct
TCAAGAYYAWPMCL

SEQ ID NO: 1204 - protein, 14 aa, synthetic construct
SCAAGAPYPWPECL

SEQ ID NO: 1205 - protein, 14 aa, synthetic construct
TCSAGAAYAWPYCL

SEQ ID NO: 1206 - protein, 14 aa, synthetic construct
LCAAGAAYPWPMCL

SEQ ID NO: 1207 - protein, 14 aa, synthetic construct
SCAAGATYEWPICL

SEQ ID NO: 1208 - protein, 14 aa, synthetic construct
SCAAGAMWPWPVCV

SEQ ID NO: 1209 - protein, 14 aa, synthetic construct
SCAAGAQYGWPMCL

SEQ ID NO: 1210 - protein, 14 aa, synthetic construct
WCAAGASYPWPWCL

SEQ ID NO: 1211 - protein, 14 aa, synthetic construct
TCTAVFPYEWPRCL

SEQ ID NO: 1212 - protein, 14 aa, synthetic construct
SCAAGATFHWPMCF

SEQ ID NO: 1213 - protein, 14 aa, synthetic construct
TCSAGFSYKWPWCL

SEQ ID NO: 1214 - protein, 14 aa, synthetic construct
TCAAGAMWTWPECL

SEQ ID NO: 1215 - protein, 14 aa, synthetic construct
TCAAGATYPWPECM

SEQ ID NO: 1216 - protein, 14 aa, synthetic construct
LCAAGFNYPWPLCL

SEQ ID NO: 1217 - protein, 14 aa, synthetic construct
MCTAGATYPWPACL

SEQ ID NO: 1218 - protein, 14 aa, synthetic construct
SCSAGAAWPWPWCL

SEQ ID NO: 1219 - protein, 14 aa, synthetic construct
LCAEGFDYSWPMCL

SEQ ID NO: 1220 - protein, 14 aa, synthetic construct
TCSAGATYSWPFCF

SEQ ID NO: 1221 - protein, 14 aa, synthetic construct
SCKAGAPYYWPGCF

SEQ ID NO: 1222 - protein, 14 aa, synthetic construct
TCSAVFSYTWSNCF

SEQ ID NO: 1223 - protein, 14 aa, synthetic construct
QCAAGAMWTWPACF

SEQ ID NO: 1224 - protein, 14 aa, synthetic construct
TCAAGAAWEWPICF

SEQ ID NO: 1225 - protein, 14 aa, synthetic construct
TCAAGAMWNWPQCY

SEQ ID NO: 1226 - protein, 14 aa, synthetic construct
SCSAGAMYPWPMCL

SEQ ID NO: 1227 - protein, 14 aa, synthetic construct
TCAAGASWEWPLCF

SEQ ID NO: 1228 - protein, 14 aa, synthetic construct
TCSAGATYVWPDCF

SEQ ID NO: 1229 - protein, 14 aa, synthetic construct
TCEAVFIYSWPFCL

SEQ ID NO: 1230 - protein, 14 aa, synthetic construct
LCSAGAMWQWPTCL

SEQ ID NO: 1231 - protein, 14 aa, synthetic construct
LCAEGADYPWPMCL

SEQ ID NO: 1232 - protein, 14 aa, synthetic construct
TCAAGATWDWPLCF

SEQ ID NO: 1233 - protein, 14 aa, synthetic construct
SCAAGAHYKWPVCI

SEQ ID NO: 1234 - protein, 14 aa, synthetic construct
ICAAGFIWSWPACF

SEQ ID NO: 1235 - protein, 14 aa, synthetic construct
TCAAGATYSWPDCF

SEQ ID NO: 1236 - protein, 14 aa, synthetic construct
QCAAGAMWTWPVCF

SEQ ID NO: 1237 - protein, 14 aa, synthetic construct
TCAAGAHYLWPHCL

SEQ ID NO: 1238 - protein, 14 aa, synthetic construct
PCAAGAMWAWPYCL

SEQ ID NO: 1239 - protein, 14 aa, synthetic construct
NCSAGATWPWPMCF

SEQ ID NO: 1240 - protein, 14 aa, synthetic construct
TCAAGVHFGWPLCF

SEQ ID NO: 1241 - protein, 14 aa, synthetic construct
TCAAGATYTWPTCF

SEQ ID NO: 1242 - protein, 14 aa, synthetic construct
TCAAGASWEWPACL

SEQ ID NO: 1243 - protein, 14 aa, synthetic construct
TCAAGAMYQWPECF

SEQ ID NO: 1244 - protein, 14 aa, synthetic construct
TCAAGAHYTWPTCL

SEQ ID NO: 1245 - protein, 14 aa, synthetic construct
TCSAGATYKWPVCL

SEQ ID NO: 1246 - protein, 14 aa, synthetic construct
SCSAGATYEWPYCF

SEQ ID NO: 1247 - protein, 14 aa, synthetic construct
TCAAGANWHWPWCF

SEQ ID NO: 1248 - protein, 14 aa, synthetic construct
LCAAGATYPWPICL

SEQ ID NO: 1249 - protein, 14 aa, synthetic construct
SCSAGALWKWPVCF

SEQ ID NO: 1250 - protein, 14 aa, synthetic construct
TCSAGFSYKWPWCW

SEQ ID NO: 1251 - protein, 14 aa, synthetic construct
SCSAGAMYQWPLCF

SEQ ID NO: 1252 - protein, 14 aa, synthetic construct
QCAAGAMWTWPACF

SEQ ID NO: 1253 - protein, 14 aa, synthetic construct
TCSAGATYMWPACF

SEQ ID NO: 1254 - protein, 14 aa, synthetic construct
TCSAGATYAWPACF

SEQ ID NO: 1255 - protein, 14 aa, synthetic construct
WCGVGMDWRWPECL

SEQ ID NO: 1256 - protein, 14 aa, synthetic construct
TCEDGFHFSWPECF

SEQ ID NO: 1257 - protein, 14 aa, synthetic construct
QCAAGAMWTWPACF

SEQ ID NO: 1258 - protein, 14 aa, synthetic construct
TCSAGATYTWPSCF

SEQ ID NO: 1259 - protein, 14 aa, synthetic construct
WCDQFFHYKWPLCL

SEQ ID NO: 1260 - protein, 14 aa, synthetic construct
SCAAGATYVWPMCF

SEQ ID NO: 1261 - protein, 14 aa, synthetic construct
TCAAGAHYSWPFCM

SEQ ID NO: 1262 - protein, 14 aa, synthetic construct
SCSAGASLQLSQCF

SEQ ID NO: 1263 - protein, 14 aa, synthetic construct
RCSFRFITLAEACV

SEQ ID NO: 1264 - protein, 14 aa, synthetic construct
TCSAGAHYPWPICL

SEQ ID NO: 1265 - protein, 14 aa, synthetic construct
TCAAGAQFAWPLCL

SEQ ID NO: 1266 - protein, 14 aa, synthetic construct
LCSAGFLFQWSTCL

SEQ ID NO: 1267 - protein, 14 aa, synthetic construct
RCAAGFHYSWPNCF

SEQ ID NO: 1268 - protein, 14 aa, synthetic construct
GCAAGASYPWPACL

SEQ ID NO: 1269 - protein, 14 aa, synthetic construct
PCAAGAMWPWPVCL

SEQ ID NO: 1270 - protein, 14 aa, synthetic construct
TCSAGATYSWPACL

SEQ ID NO: 1271 - protein, 14 aa, synthetic construct
TCAAGASWNWPACE

SEQ ID NO: 1272 - protein, 14 aa, synthetic construct
LCAAGAHYSWPACF

SEQ ID NO: 1273 - protein, 14 aa, synthetic construct
PCSAGVTYAWLYCV

SEQ ID NO: 1274 - protein, 14 aa, synthetic construct
MCAAGAAWAWPLCL

SEQ ID NO: 1275 - protein, 14 aa, synthetic construct
TCAAGASYPWPLCV

SEQ ID NO: 1276 - protein, 14 aa, synthetic construct
LCAAGFMYEWPLCF

SEQ ID NO: 1277 - protein, 14 aa, synthetic construct
TCSAGAEYTWPLCF

SEQ ID NO: 1278 - protein, 14 aa, synthetic construct
SCAAGAAWGWPACF

SEQ ID NO: 1279 - protein, 14 aa, synthetic construct
TCAAGATWLWPVCL

SEQ ID NO: 1280 - protein, 14 aa, synthetic construct
SCSAFFHFHWPACL

SEQ ID NO: 1281 - protein, 14 aa, synthetic construct
TCSAGANWVWPLCL

SEQ ID NO: 1282 - protein, 14 aa, synthetic construct
TCSAGAHWVWPYCL

SEQ ID NO: 1283 - protein, 14 aa, synthetic construct
SCAAGATYGWPECF

SEQ ID NO: 1284 - protein, 14 aa, synthetic construct
SCAAGATWAWPACL

SEQ ID NO: 1285 - protein, 14 aa, synthetic construct
LCSAGAMWEWPLCL

SEQ ID NO: 1286 - protein, 14 aa, synthetic construct
TCSAGAGYPWPTCL

SEQ ID NO: 1287 - protein, 14 aa, synthetic construct
TCSAGAAWTWPLCF

SEQ ID NO: 1288 - protein, 14 aa, synthetic construct
TCSAGAAYEWPECF

SEQ ID NO: 1289 - protein, 14 aa, synthetic construct
TCSAGALWEWPMCF

SEQ ID NO: 1290 - protein, 14 aa, synthetic construct
PCAAGAHYTWPTCL

SEQ ID NO: 1291 - protein, 14 aa, synthetic construct
SCSAGATYTWPACL

SEQ ID NO: 1292 - protein, 14 aa, synthetic construct
TCSAGAHYSWPKCF

SEQ ID NO: 1293 - protein, 14 aa, synthetic construct
SCAAGAHYPWPECL

SEQ ID NO: 1294 - protein, 14 aa, synthetic construct
SCAEVFNYVWPFCF

SEQ ID NO: 1295 - protein, 14 aa, synthetic construct
TCAAGAAYTWPVCF

SEQ ID NO: 1296 - protein, 14 aa, synthetic construct
SCAAGAMWEWPKCF

SEQ ID NO: 1297 - protein, 14 aa, synthetic construct
SCADGAIWEWPWCF

SEQ ID NO: 1298 - protein, 14 aa, synthetic construct
TCAAGATYEWPSCL

SEQ ID NO: 1299 - protein, 14 aa, synthetic construct
SCSAGAMYTWPTCL

SEQ ID NO: 1300 - protein, 14 aa, synthetic construct
LCAAGAAWEWPMCF

SEQ ID NO: 1301 - protein, 14 aa, synthetic construct
QCSAGATYAWPFCL

SEQ ID NO: 1302 - protein, 14 aa, synthetic construct
TCAAGVPYKWPPCL

SEQ ID NO: 1303 - protein, 14 aa, synthetic construct
SCAAGATYTWPFCL

SEQ ID NO: 1304 - protein, 14 aa, synthetic construct
RCAAVFSYTWPPCL

SEQ ID NO: 1305 - protein, 14 aa, synthetic construct
TCSAGATYKWPACF

SEQ ID NO: 1306 - protein, 14 aa, synthetic construct
LCAAGAYYPWPLCF

SEQ ID NO: 1307 - protein, 14 aa, synthetic construct
TCTAGFSYKWPTCL

SEQ ID NO: 1308 - protein, 14 aa, synthetic construct
NCSAGATWPWPMCF

SEQ ID NO: 1309 - protein, 14 aa, synthetic construct
SCSAGATYQWPYCF

SEQ ID NO: 1310 - protein, 14 aa, synthetic construct
SCAAGATYSWPACL

SEQ ID NO: 1311 - protein, 14 aa, synthetic construct
NCAAGAMYSWPTCL

SEQ ID NO: 1312 - protein, 14 aa, synthetic construct
RCAAGAMWTWPACF

SEQ ID NO: 1313 - protein, 14 aa, synthetic construct
TCAAGATYMWPVCL

SEQ ID NO: 1314 - protein, 14 aa, synthetic construct
SCAAGATWKWPECL

SEQ ID NO: 1315 - protein, 14 aa, synthetic construct
TCAAGATWLWPWCL

SEQ ID NO: 1316 - protein, 14 aa, synthetic construct
TCAAGAVWTWPICF

SEQ ID NO: 1317 - protein, 14 aa, synthetic construct
TCADGAFWQWPVCL

SEQ ID NO: 1318 - protein, 14 aa, synthetic construct
TCSAGASWGWPWCL

SEQ ID NO: 1319 - protein, 14 aa, synthetic construct
TCSAGATYSWPYCL

SEQ ID NO: 1320 - protein, 14 aa, synthetic construct
TCSAGATYSWPSCF

SEQ ID NO: 1321 - protein, 14 aa, synthetic construct
LCAAGATYPWPDCV

SEQ ID NO: 1322 - protein, 14 aa, synthetic construct
TCAAGANWPWPECL

SEQ ID NO: 1323 - protein, 14 aa, synthetic construct
LCEEFFHYSWPLCL

SEQ ID NO: 1324 - protein, 14 aa, synthetic construct
PCSDGVAYPWPYCV

SEQ ID NO: 1325 - protein, 14 aa, synthetic construct
SCAAGAHWSWPVCF

SEQ ID NO: 1326 - protein, 14 aa, synthetic construct
LCSAGAMYPWPVCL

SEQ ID NO: 1327 - protein, 14 aa, synthetic construct
SCSAGATWAWPQCF

SEQ ID NO: 1328 - protein, 14 aa, synthetic construct
SCSAVFSYRWPKCL

SEQ ID NO: 1329 - protein, 14 aa, synthetic construct
SCSAGAGWAWPMCF

SEQ ID NO: 1330 - protein, 14 aa, synthetic construct
SCAAGFDYGWPMCL

SEQ ID NO: 1331 - protein, 14 aa, synthetic construct
SCADGFNYVWPLCF

SEQ ID NO: 1332 - protein, 14 aa, synthetic construct
TCAAGANYSWPACL

SEQ ID NO: 1333 - protein, 14 aa, synthetic construct
QCAAGATYPWPVCL

SEQ ID NO: 1334 - protein, 14 aa, synthetic construct
TCSAGATYTWPVCF

SEQ ID NO: 1335 - protein, 14 aa, synthetic construct
TCSAGAHYEWPKCL

SEQ ID NO: 1336 - protein, 14 aa, synthetic construct
TCSAGATYSWPLCF

SEQ ID NO: 1337 - protein, 14 aa, synthetic construct
TCAAGATYSWPSCF

SEQ ID NO: 1338 - protein, 14 aa, synthetic construct
TCAAGANYAWPVCL

SEQ ID NO: 1339 - protein, 14 aa, synthetic construct
TCAAGAHYEWPQCF

SEQ ID NO: 1340 - protein, 14 aa, synthetic construct
TCAAGATYNWPWCF

SEQ ID NO: 1341 - protein, 14 aa, synthetic construct
TCAAGATWTWPTCM

SEQ ID NO: 1342 - protein, 14 aa, synthetic construct
PCAAGAQWSWPMCL

SEQ ID NO: 1343 - protein, 14 aa, synthetic construct
SCAAGSTWAWPACL

SEQ ID NO: 1344 - protein, 14 aa, synthetic construct
SCAAGFHYEWPQCF

SEQ ID NO: 1345 - protein, 14 aa, synthetic construct
SCTAGFRIHWPMCF

SEQ ID NO: 1346 - protein, 14 aa, synthetic construct
SCAAGAAYAWPWCL

SEQ ID NO: 1347 - protein, 14 aa, synthetic construct
MCTAGFSFNWPECL

SEQ ID NO: 1348 - protein, 14 aa, synthetic construct
LCDQFFHYNWPACL

SEQ ID NO: 1349 - protein, 14 aa, synthetic construct
SCAAVFSFNWPECF

SEQ ID NO: 1350 - protein, 14 aa, synthetic construct
TCSAGASYSWPYCM

SEQ ID NO: 1351 - protein, 14 aa, synthetic construct
WCSEVFSYPWPACL

SEQ ID NO: 1352 - protein, 14 aa, synthetic construct
SCTAVFSYALSPCF

SEQ ID NO: 1353 - protein, 14 aa, synthetic construct
LCAAVFAYTWPMCF

SEQ ID NO: 1354 - protein, 14 aa, synthetic construct
PCAAGAHYVWPVCF

SEQ ID NO: 1355 - protein, 14 aa, synthetic construct
TCSAGATYKWPTCL

SEQ ID NO: 1356 - protein, 14 aa, synthetic construct
SCAAGAHWSWPACL

SEQ ID NO: 1357 - protein, 14 aa, synthetic construct
MCAAGAMYNWPLCL

SEQ ID NO: 1358 - protein, 14 aa, synthetic construct
SCAAGASYSWPLCF

SEQ ID NO: 1359 - protein, 14 aa, synthetic construct
VCAAGAAYPWPACL

SEQ ID NO: 1360 - protein, 14 aa, synthetic construct
TCSAGAHYPWPMCL

SEQ ID NO: 1361 - protein, 14 aa, synthetic construct
TCAAGATWVWPTCF

SEQ ID NO: 1362 - protein, 14 aa, synthetic construct
TCSAGAMYNWPECF

SEQ ID NO: 1363 - protein, 14 aa, synthetic construct
TCSAGAMYSWPLCI

SEQ ID NO: 1364 - protein, 14 aa, synthetic construct
QCAAGFSYTWPECY

SEQ ID NO: 1365 - protein, 14 aa, synthetic construct
WCAAFFHYPWPQCF

SEQ ID NO: 1366 - protein, 14 aa, synthetic construct
RCKAGVPYKWPMCL

SEQ ID NO: 1367 - protein, 14 aa, synthetic construct
TCAAGATYEWPSCI

SEQ ID NO: 1368 - protein, 14 aa, synthetic construct
TCAAGAKYVWPLCF

SEQ ID NO: 1369 - protein, 14 aa, synthetic construct
LCEAGFNYDWPRCL

SEQ ID NO: 1370 - protein, 14 aa, synthetic construct
TCAAGASWDWPFCF

SEQ ID NO: 1371 - protein, 14 aa, synthetic construct
ECGWEPGQHWRVCF

SEQ ID NO: 1372 - protein, 14 aa, synthetic construct
SCAAGATYEWPTCL

SEQ ID NO: 1373 - protein, 14 aa, synthetic construct
SCAAGATYKWPACF

SEQ ID NO: 1374 - protein, 14 aa, synthetic construct
SCSAGAMWLWPECF

SEQ ID NO: 1375 - protein, 14 aa, synthetic construct
WCSAVFSYQWPPCF

SEQ ID NO: 1376 - protein, 14 aa, synthetic construct
TCSAGATYKWPMCF

SEQ ID NO: 1377 - protein, 14 aa, synthetic construct
TCSAGATYGWPACF

SEQ ID NO: 1378 - protein, 14 aa, synthetic construct
ICAAGAGWPWPWCL

SEQ ID NO: 1379 - protein, 14 aa, synthetic construct
ECSAGAMWGWPACF

SEQ ID NO: 1380 - protein, 14 aa, synthetic construct
TCAAGATYDWPSCL

SEQ ID NO: 1381 - protein, 14 aa, synthetic construct
TCAAGAVWQWPTCF

SEQ ID NO: 1382 - protein, 14 aa, synthetic construct
PCSAGATYAWPYCL

SEQ ID NO: 1383 - protein, 14 aa, synthetic construct
TCAAGAQLEWPWCF

SEQ ID NO: 1384 - protein, 14 aa, synthetic construct
GCAAGAEYNWPTCL

SEQ ID NO: 1385 - protein, 14 aa, synthetic construct
TCAAGAAYTWPHCF

SEQ ID NO: 1386 - protein, 14 aa, synthetic construct
TCSAGAQWEWPACL

SEQ ID NO: 1387 - protein, 14 aa, synthetic construct
WCSAVFSYQWPVCL

SEQ ID NO: 1388 - protein, 14 aa, synthetic construct
SCSAGASYAWPMCI

SEQ ID NO: 1389 - protein, 14 aa, synthetic construct
DCWWDSPYHWRVCL

SEQ ID NO: 1390 - protein, 14 aa, synthetic construct
SCAAGAGYGWPQCL

SEQ ID NO: 1391 - protein, 14 aa, synthetic construct
SCGGGFHYSWPLCF

SEQ ID NO: 1392 - protein, 14 aa, synthetic construct
GCAAGFHYTLSTCL

SEQ ID NO: 1393 - protein, 284 aa, synthetic construct; identical to SEQ ID NO: 74

SEQ ID NO: 1394 - protein, 284 aa, synthetic construct; identical to SEQ ID NO: 88

SEQ ID NO: 1395 - protein, 284 aa, synthetic construct; identical to SEQ ID NO: 74

SEQ ID NO: 1396 - protein, 284 aa, synthetic construct
IDWCPRYLWDECYNAGSGGSGGLSGRSDAGSPLGLAGSGGGSDIQMTQSPSSLSASVGDRVTITCHASQNIYVWLNWYQQKPGKAPKLLIYKASNLHTGVPSRFSGSGSGTDFTLTISSLQPEDFATYYCQQGQTYPYTFGGGTKVEIKGGGGSGGGGSGGGGSQVQLVQSGAEVKKPGASVKVSCKASGYTFTSYYIHWVRQAPGQGLEWIGSIYPGNVNTNYNEKFKDRATLTVDTSISTAYMELSRLRSDDTAVYFCTRSHYGLDWNFDVWGQGTTVTVSS

SEQ ID NO: 1397 - protein, 284 aa, synthetic construct; identical to SEQ ID NO: 74

SEQ ID NO: 1398 - protein, 284 aa, synthetic construct; identical to SEQ ID NO: 74

SEQ ID NO: 1399 - protein, 284 aa, synthetic construct; identical to SEQ ID NO: 74

SEQ ID NO: 1400 - protein, 284 aa, synthetic construct; identical to SEQ ID NO: 74

SEQ ID NO: 1401 - protein, 284 aa, synthetic construct; identical to SEQ ID NO: 84

SEQ ID NO: 1402 - protein, 284 aa, synthetic construct; identical to SEQ ID NO: 84

SEQ ID NO: 1403 - protein, 284 aa, synthetic construct; identical to SEQ ID NO: 84

SEQ ID NO: 1404 - protein, 284 aa, synthetic construct; identical to SEQ ID NO: 84

SEQ ID NO: 1405 - protein, 284 aa, synthetic construct; identical to SEQ ID NO: 74

SEQ ID NO: 1406 - protein, 284 aa, synthetic construct; identical to SEQ ID NO: 74

SEQ ID NO: 1407 - protein, 284 aa, synthetic construct; identical to SEQ ID NO: 74

SEQ ID NO: 1408 - protein, 284 aa, synthetic construct; identical to SEQ ID NO: 74

SEQ ID NO: 1409 - protein, 284 aa, synthetic construct; identical to SEQ ID NO: 84

SEQ ID NO: 1410 - protein, 284 aa, synthetic construct; identical to SEQ ID NO: 84

SEQ ID NO: 1411 - protein, 284 aa, synthetic construct; identical to SEQ ID NO: 84

SEQ ID NO: 1412 - protein, 284 aa, synthetic construct; identical to SEQ ID NO: 84

SEQ ID NO: 1413 - protein, 284 aa, synthetic construct; identical to SEQ ID NO: 74

SEQ ID NO: 1414 - protein, 284 aa, synthetic construct; identical to SEQ ID NO: 74

SEQ ID NO: 1415 - protein, 284 aa, synthetic construct; identical to SEQ ID NO: 74

SEQ ID NO: 1416 - protein, 284 aa, synthetic construct; identical to SEQ ID NO: 74

SEQ ID NO: 1417 - protein, 284 aa, synthetic construct; identical to SEQ ID NO: 84

SEQ ID NO: 1418 - protein, 284 aa, synthetic construct; identical to SEQ ID NO: 84

SEQ ID NO: 1419 - protein, 284 aa, synthetic construct; identical to SEQ ID NO: 84

SEQ ID NO: 1420 - protein, 284 aa, synthetic construct; identical to SEQ ID NO: 84

SEQ ID NO: 1421 - protein, 284 aa, synthetic construct; identical to SEQ ID NO: 74

SEQ ID NO: 1422 - protein, 284 aa, synthetic construct; identical to SEQ ID NO: 74

SEQ ID NO: 1423 - protein, 284 aa, synthetic construct; identical to SEQ ID NO: 74

SEQ ID NO: 1424 - protein, 284 aa, synthetic construct; identical to SEQ ID NO: 74

SEQ ID NO: 1425 - protein, 284 aa, synthetic construct; identical to SEQ ID NO: 84

SEQ ID NO: 1426 - protein, 284 aa, synthetic construct; identical to SEQ ID NO: 84

SEQ ID NO: 1427 - protein, 284 aa, synthetic construct; identical to SEQ ID NO: 84

SEQ ID NO: 1428 - protein, 284 aa, synthetic construct; identical to SEQ ID NO: 84

SEQ ID NO: 1429 - protein, 284 aa, synthetic construct; identical to SEQ ID NO: 74

SEQ ID NO: 1430 - protein, 284 aa, synthetic construct; identical to SEQ ID NO: 74

SEQ ID NO: 1431 - protein, 284 aa, synthetic construct; identical to SEQ ID NO: 74

SEQ ID NO: 1432 - protein, 284 aa, synthetic construct; identical to SEQ ID NO: 74

SEQ ID NO: 1433 - protein, 284 aa, synthetic construct; identical to SEQ ID NO: 84

SEQ ID NO: 1434 - protein, 284 aa, synthetic construct; identical to SEQ ID NO: 84

SEQ ID NO: 1435 - protein, 284 aa, synthetic construct; identical to SEQ ID NO: 84

SEQ ID NO: 1436 - protein, 284 aa, synthetic construct; identical to SEQ ID NO: 84

SEQ ID NO: 1437 - protein, 284 aa, synthetic construct; identical to SEQ ID NO: 74

SEQ ID NO: 1438 - protein, 284 aa, synthetic construct; identical to SEQ ID NO: 74

SEQ ID NO: 1439 - protein, 284 aa, synthetic construct; identical to SEQ ID NO: 74

SEQ ID NO: 1440 - protein, 284 aa, synthetic construct; identical to SEQ ID NO: 74

SEQ ID NO: 1441 - protein, 284 aa, synthetic construct; identical to SEQ ID NO: 84

SEQ ID NO: 1442 - protein, 284 aa, synthetic construct; identical to SEQ ID NO: 84

SEQ ID NO: 1443 - protein, 284 aa, synthetic construct; identical to SEQ ID NO: 84

SEQ ID NO: 1444 - protein, 284 aa, synthetic construct; identical to SEQ ID NO: 84

SEQ ID NO: 1445 - protein, 284 aa, synthetic construct
YCEGHLPEYLAKCLGSSGGSGGLSGRSDAGSPLGLAGSGGGSQVQLVQSGAEVKKPGASVKVSCKASGYTFTSYYIHWVRQAPGQGLEWIGSIYPGNVNTNYNEKFKDRATLTVDTSISTAYMELSRLRSDDTAVYFCTRSHYGLDWNFDVWGQGTTVTVSSGGGGSGGGGSGGGGSDIQMTQSPSSLSASVGDRVTITCHASQNIYVWLNWYQQKPGKAPKLLIYKASNLHTGVPSRFSGSGSGTDFTLTISSLQPEDFATYYCQQGQTYPYTFGGGTKVEIK

SEQ ID NO: 1446 - protein, 284 aa, synthetic construct; identical to SEQ ID NO: 1445

SEQ ID NO: 1447 - protein, 284 aa, synthetic construct
YCEGHLPEYLAKCLGSSGGSGGLSGRSDAGSPLGLAGSGGGSQVQLVQSGAEVKKPGASVKVSCKASGYTFTSYYIHWVRQAPGQCLEWIGSIYPGNVNTNYNEKFKDRATLTVDTSISTAYMELSRLRSDDTAVYFCTRSHYGLDWNFDVWGQGTTVTVSSGGGGSGGGGSGGGGSDIQMTQSPSSLSASVGDRVTITCHASQNIYVWLNWYQQKPGKAPKLLIYKASNLHTGVPSRFSGSGSGTDFTLTISSLQPEDFATYYCQQGQTYPYTFGCGTKVEIK

SEQ ID NO: 1448 - protein, 284 aa, synthetic construct
YCEGHLPEYLAKCLGSSGGSGGLSGRSDAGSPLGLAGSGGGSDIQMTQSPSSLSASVGDRVTITCHASQNIYVWLNWYQQKPGKAPKLLIYKASNLHTGVPSRFSGSGSGTDFTLTISSLQPEDFATYYCQQGQTYPYTFGGGTKVEIKGGGGSGGGGSGGGGSQVQLVQSGAEVKKPGASVKVSCKASGYTFTSYYIHWVRQAPGQGLEWIGSIYPGNVNTNYNEKFKDRATLTVDTSISTAYMELSRLRSDDTAVYFCTRSHYGLDWNFDVWGQGTTVTVSS

SEQ ID NO: 1449 - protein, 284 aa, synthetic construct; identical to SEQ ID NO: 1448

SEQ ID NO: 1450 - protein, 284 aa, synthetic construct
YCEGHLPEYLAKCLGSSGGSGGLSGRSDAGSPLGLAGSGGGSDIQMTQSPSSLSASVGDRVTITCHASQNIYVWLNWYQQKPGKAPKLLIYKASNLHTGVPSRFSGSGSGTDFTLTISSLQPEDFATYYCQQGQTYPYTFGCGTKVEIKGGGGSGGGGSGGGGSQVQLVQSGAEVKKPGASVKVSCKASGYTFTSYYIHWVRQAPGQCLEWIGSIYPGNVNTNYNEKFKDRATLTVDTSISTAYMELSRLRSDDTAVYFCTRSHYGLDWNFDVWGQGTTVTVSS

SEQ ID NO: 1451 - protein, 419 aa, synthetic construct; identical to SEQ ID NO: 100

SEQ ID NO: 1452 - protein, 410 aa, synthetic construct
EVQLVESGGGLVQPGNSLRLSCAASGFTFSSFGMSWVRQAPGKGLEWVSSISGSGSDTLYADSVKGRFTISRDNAKTTLYLQMNSLRPEDTAVYYCTIGGSLSRSSQGTLVTVSSGGGGSGGGSGGIDWCPRYLWDECYNAGSGGSGGLSGRSDAGSPLGLAGSGGGSQVQLVQSGAEVKKPGASVKVSCKASGYTFTSYYIHWVRQAPGQGLEWIGSIYPGNVNTNYNEKFKDRATLTVDTSISTAYMELSRLRSDDTAVYFCTRSHYGLDWNFDVWGQGTTVTVSSGGGGSGGGGSGGGGSDIQMTQSPSSLSASVGDRVTITCHASQNIYVWLNWYQQKPGKAPKLLIYKASNLHTGVPSRFSGSGSGTDFTLTISSLQPEDFATYYCQQGQTYPYTFGGGTKVEIK

SEQ ID NO: 1453 - protein, 410 aa, synthetic construct
EVQLVESGGGLVQPGNSLRLSCAASGFTFSSFGMSWVRQAPGKGLEWVSSISGSGSDTLYADSVKGRFTISRDNAKTTLYLQMNSLRPEDTAVYYCTIGGSLSRSSQGTLVTVSSGGGGSGGGSGGMDWCPRDLWVHCFAGSSGGSGGLSGRSDAGSPLGLAGSGGGSQVQLVQSGAEVKKPGASVKVSCKASGYTFTSYYIHWVRQAPGQGLEWIGSIYPGNVNTNYNEKFKDRATLTVDTSISTAYMELSRLRSDDTAVYFCTRSHYGLDWNFDVWGQGTTVTVSSGGGGSGGGGSGGGGSDIQMTQSPSSLSASVGDRVTITCHASQNIYVWLNWYQQKPGKAPKLLIYKASNLHTGVPSRFSGSGSGTDFTLTISSLQPEDFATYYCQQGQTYPYTFGGGTKVEIK

SEQ ID NO: 1454 - protein, 419 aa, synthetic construct
EVQLVESGGGLVQPGGSLRLSCAASGSTFYTAVMGWVRQAPGKGLEWVAAIRWTALTTSYADSVKGRFTISRDGAKTTLYLQMNSLRPEDTAVYYCAARGTLGLFTTADSYDYWGQGTLVTVSSGGGGSGGGSGGIDWCPRYLWDECYNAGSGGSGGLSGRSDAGSPLGLAGSGGGSDIQMTQSPSSLSASVGDRVTITCHASQNIYVWLNWYQQKPGKAPKLLIYKASNLHTGVPSRFSGSGSGTDFTLTISSLQPEDFATYYCQQGQTYPYTFGGGTKVEIKGGGGSGGGGSGGGGSQVQLVQSGAEVKKPGASVKVSCKASGYTFTSYYIHWVRQAPGQGLEWIGSIYPGNVNTNYNEKFKDRATLTVDTSISTAYMELSRLRSDDTAVYFCTRSHYGLDWNFDVWGQGTTVTVSS

SEQ ID NO: 1455 - protein, 419 aa, synthetic construct; identical to SEQ ID NO: 100

SEQ ID NO: 1456 - protein, 419 aa, synthetic construct; identical to SEQ ID NO: 100

SEQ ID NO: 1457 - protein, 410 aa, synthetic construct; identical to SEQ ID NO: 1453

SEQ ID NO: 1458 - protein, 410 aa, synthetic construct; identical to SEQ ID NO: 1453

SEQ ID NO: 1459 - protein, 419 aa, synthetic construct; identical to SEQ ID NO: 110

SEQ ID NO: 1460 - protein, 419 aa, synthetic construct; identical to SEQ ID NO: 110

SEQ ID NO: 1461 - protein, 410 aa, synthetic construct
EVQLVESGGGLVQPGNSLRLSCAASGFTFSSFGMSWVRQAPGKGLEWVSSISGSGSDTLYADSVKGRFTISRDNAKTTLYLQMNSLRPEDTAVYYCTIGGSLSRSSQGTLVTVSSGGGGSGGGSGGMDWCPRDLWVHCFAGSSGGSGGLSGRSDAGSPLGLAGSGGGSDIQMTQSPSSLSASVGDRVTITCHASQNIYVWLNWYQQKPGKAPKLLIYKASNLHTGVPSRFSGSGSGTDFTLTISSLQPEDFATYYCQQGQTYPYTFGGGTKVEIKGGGGSGGGGSGGGGSQVQLVQSGAEVKKPGASVKVSCKASGYTFTSYYIHWVRQAPGQGLEWIGSIYPGNVNTNYNEKFKDRATLTVDTSISTAYMELSRLRSDDTAVYFCTRSHYGLDWNFDVWGQGTTVTVSS

SEQ ID NO: 1462 - protein, 410 aa, synthetic construct; identical to SEQ ID NO: 1461

SEQ ID NO: 1463 - protein, 419 aa, synthetic construct; identical to SEQ ID NO: 100

SEQ ID NO: 1464 - protein, 419 aa, synthetic construct; identical to SEQ ID NO: 100

SEQ ID NO: 1465 - protein, 410 aa, synthetic construct; identical to SEQ ID NO: 1453

SEQ ID NO: 1466 - protein, 410 aa, synthetic construct; identical to SEQ ID NO: 1453

SEQ ID NO: 1467 - protein, 419 aa, synthetic construct; identical to SEQ ID NO: 110

SEQ ID NO: 1468 - protein, 419 aa, synthetic construct; identical to SEQ ID NO: 110

SEQ ID NO: 1469 - protein, 410 aa, synthetic construct; identical to SEQ ID NO: 1461

SEQ ID NO: 1470 - protein, 410 aa, synthetic construct; identical to SEQ ID NO: 1461

SEQ ID NO: 1471 - protein, 419 aa, synthetic construct; identical to SEQ ID NO: 100

SEQ ID NO: 1472 - protein, 419 aa, synthetic construct; identical to SEQ ID NO: 100

SEQ ID NO: 1473 - protein, 410 aa, synthetic construct; identical to SEQ ID NO: 1453

SEQ ID NO: 1474 - protein, 410 aa, synthetic construct; identical to SEQ ID NO: 1453

SEQ ID NO: 1475 - protein, 419 aa, synthetic construct; identical to SEQ ID NO: 110

SEQ ID NO: 1476 - protein, 419 aa, synthetic construct; identical to SEQ ID NO: 110

SEQ ID NO: 1477 - protein, 410 aa, synthetic construct; identical to SEQ ID NO: 1461

SEQ ID NO: 1478 - protein, 410 aa, synthetic construct; identical to SEQ ID NO: 1461

SEQ ID NO: 1479 - protein, 419 aa, synthetic construct; identical to SEQ ID NO: 100

SEQ ID NO: 1480 - protein, 419 aa, synthetic construct; identical to SEQ ID NO: 100

SEQ ID NO: 1481 - protein, 410 aa, synthetic construct; identical to SEQ ID NO: 1453

SEQ ID NO: 1482 - protein, 410 aa, synthetic construct; identical to SEQ ID NO: 1453

SEQ ID NO: 1483 - protein, 419 aa, synthetic construct; identical to SEQ ID NO: 110

SEQ ID NO: 1484 - protein, 419 aa, synthetic construct; identical to SEQ ID NO: 110

SEQ ID NO: 1485 - protein, 410 aa, synthetic construct; identical to SEQ ID NO: 1461

SEQ ID NO: 1486 - protein, 410 aa, synthetic construct; identical to SEQ ID NO: 1461

SEQ ID NO: 1487 - protein, 419 aa, synthetic construct; identical to SEQ ID NO: 100

SEQ ID NO: 1488 - protein, 419 aa, synthetic construct; identical to SEQ ID NO: 100

SEQ ID NO: 1489 - protein, 410 aa, synthetic construct; identical to SEQ ID NO: 1453

SEQ ID NO: 1490 - protein, 410 aa, synthetic construct; identical to SEQ ID NO: 1453

SEQ ID NO: 1491 - protein, 419 aa, synthetic construct; identical to SEQ ID NO: 110

SEQ ID NO: 1492 - protein, 419 aa, synthetic construct; identical to SEQ ID NO: 110

SEQ ID NO: 1493 - protein, 410 aa, synthetic construct; identical to SEQ ID NO: 1461

SEQ ID NO: 1494 - protein, 410 aa, synthetic construct; identical to SEQ ID NO: 1461

SEQ ID NO: 1495 - protein, 419 aa, synthetic construct; identical to SEQ ID NO: 100

SEQ ID NO: 1496 - protein, 419 aa, synthetic construct; identical to SEQ ID NO: 100

SEQ ID NO: 1497 - protein, 410 aa, synthetic construct; identical to SEQ ID NO: 1453

SEQ ID NO: 1498 - protein, 410 aa, synthetic construct; identical to SEQ ID NO: 1453

SEQ ID NO: 1499 - protein, 419 aa, synthetic construct; identical to SEQ ID NO: 110

SEQ ID NO: 1500 - protein, 419 aa, synthetic construct; identical to SEQ ID NO: 110

SEQ ID NO: 1501 - protein, 410 aa, synthetic construct; identical to SEQ ID NO: 1461

SEQ ID NO: 1502 - protein, 410 aa, synthetic construct; identical to SEQ ID NO: 1461

SEQ ID NO: 1503 - protein, 419 aa, synthetic construct
EVQLVESGGGLVQPGGSLRLSCAASGSTFYTAVMGWVRQAPGKGLEWVAAIRWTALTTSYADSVKGRFTISRDGAKTTLYLQMNSLRPEDTAVYYCAARGTLGLFTTADSYDYWGQGTLVTVSSGGGGSGGGSGGYCEGHLPEYLAKCLGSSGGSGGLSGRSDAGSPLGLAGSGGGSQVQLVQSGAEVKKPGASVKVSCKASGYTFTSYYIHWVRQAPGQGLEWIGSIYPGNVNTNYNEKFKDRATLTVDTSISTAYMELSRLRSDDTAVYFCTRSHYGLDWNFDVWGQGTTVTVSSGGGGSGGGGSGGGGSDIQMTQSPSSLSASVGDRVTITCHASQNIYVWLNWYQQKPGKAPKLLIYKASNLHTGVPSRFSGSGSGTDFTLTISSLQPEDFATYYCQQGQTYPYTFGGGTKVEIK

SEQ ID NO: 1504 - protein, 419 aa, synthetic construct; identical to SEQ ID NO: 1503

SEQ ID NO: 1505 - protein, 419 aa, synthetic construct
EVQLVESGGGLVQPGGSLRLSCAASGSTFYTAVMGWVRQAPGKGLEWVAAIRWTALTTSYADSVKGRFTISRDGAKTTLYLQMNSLRPEDTAVYYCAARGTLGLFTTADSYDYWGQGTLVTVSSGGGGSGGGSGGYCEGHLPEYLAKCLGSSGGSGGLSGRSDAGSPLGLAGSGGGSQVQLVQSGAEVKKPGASVKVSCKASGYTFTSYYIHWVRQAPGQCLEWIGSIYPGNVNTNYNEKFKDRATLTVDTSISTAYMELSRLRSDDTAVYFCTRSHYGLDWNFDVWGQGTTVTVSSGGGGSGGGGSGGGGSDIQMTQSPSSLSASVGDRVTITCHASQNIYVWLNWYQQKPGKAPKLLIYKASNLHTGVPSRFSGSGSGTDFTLTISSLQPEDFATYYCQQGQTYPYTFGCGTKVEIK

SEQ ID NO: 1506 - protein, 419 aa, synthetic construct
EVQLVESGGGLVQPGGSLRLSCAASGSTFYTAVMGWVRQAPGKGLEWVAAIRWTALTTSYADSVKGRFTISRDGAKTTLYLQMNSLRPEDTAVYYCAARGTLGLFTTADSYDYWGQGTLVTVSSGGGGSGGGSGGYCEGHLPEYLAKCLGSSGGSGGLSGRSDAGSPLGLAGSGGGSDIQMTQSPSSLSASVGDRVTITCHASQNIYVWLNWYQQKPGKAPKLLIYKASNLHTGVPSRFSGSGSGTDFTLTISSLQPEDFATYYCQQGQTYPYTFGGGTKVEIKGGGGSGGGGSGGGGSQVQLVQSGAEVKKPGASVKVSCKASGYTFTSYYIHWVRQAPGQGLEWIGSIYPGNVNTNYNEKFKDRATLTVDTSISTAYMELSRLRSDDTAVYFCTRSHYGLDWNFDVWGQGTTVTVSS

SEQ ID NO: 1507 - protein, 419 aa, synthetic construct; identical to SEQ ID NO: 1506

SEQ ID NO: 1508 - protein, 419 aa, synthetic construct
EVQLVESGGGLVQPGGSLRLSCAASGSTFYTAVMGWVRQAPGKGLEWVAAIRWTALTTSYADSVKGRFTISRDGAKTTLYLQMNSLRPEDTAVYYCAARGTLGLFTTADSYDYWGQGTLVTVSSGGGGSGGGSGGYCEGHLPEYLAKCLGSSGGSGGLSGRSDAGSPLGLAGSGGGSDIQMTQSPSSLSASVGDRVTITCHASQNIYVWLNWYQQKPGKAPKLLIYKASNLHTGVPSRFSGSGSGTDFTLTISSLQPEDFATYYCQQGQTYPYTFGCGTKVEIKGGGGSGGGGSGGGGSQVQLVQSGAEVKKPGASVKVSCKASGYTFTSYYIHWVRQAPGQCLEWIGSIYPGNVNTNYNEKFKDRATLTVDTSISTAYMELSRLRSDDTAVYFCTRSHYGLDWNFDVWGQGTTVTVSS

SEQ ID NO: 1509 - protein, 115 aa, synthetic construct [sequence omitted]

SEQ ID NO: 1510 - protein, 14 aa, synthetic construct
LICKSGSILILCAQ

SEQ ID NO: 1511 - protein, 14 aa, synthetic construct
SPCGLFQWMEICEF

SEQ ID NO: 1512 - protein, 14 aa, synthetic construct
SFCGLFLDLWICEF

SEQ ID NO: 1513 - protein, 14 aa, synthetic construct
DNCYVIWGFEWQCR

SEQ ID NO: 1514 - protein, 14 aa, synthetic construct
VNCMRVHRTLTWCV

SEQ ID NO: 1515 - protein, 14 aa, synthetic construct
FCTPREWSFLNFVC

SEQ ID NO: 1516 - protein, 14 aa, synthetic construct
CFAYLWIDSWIRVC

SEQ ID NO: 1517 - protein, 14 aa, synthetic construct
MDWCPRERWVDCFF

SEQ ID NO: 1518 - protein, 14 aa, synthetic construct
GQHCATSMWRYCMF

SEQ ID NO: 1519 - protein, 14 aa, synthetic construct
GYCHYWGDMVMWCG

SEQ ID NO: 1520 - protein, 14 aa, synthetic construct
DNCHYIWGFEWQCG

SEQ ID NO: 1521 - protein, 14 aa, synthetic construct
IDCIMVHMVKPWCF

SEQ ID NO: 1522 - protein, 14 aa, synthetic construct
NCQPWYWNMFAFGC

SEQ ID NO: 1523 - protein, 14 aa, synthetic construct
NCQPWYWNMIAFGC

SEQ ID NO: 1524 - protein, 14 aa, synthetic construct
GCFTWSQRTFPFTC

SEQ ID NO: 1525 - protein, 14 aa, synthetic construct
CFYAEYYDQVYSFC

SEQ ID NO: 1526 - protein, 14 aa, synthetic construct
ADWCPRERWVDCFF

SEQ ID NO: 1527 - protein, 14 aa, synthetic construct
MAWCPRERWVDCFF

SEQ ID NO: 1528 - protein, 14 aa, synthetic construct
MDACPRERWVDCFF

SEQ ID NO: 1529 - protein, 14 aa, synthetic construct
MDWCARERWVDCFF

SEQ ID NO: 1530 - protein, 14 aa, synthetic construct
MDWCPAERWVDCFF

SEQ ID NO: 1531 - protein, 14 aa, synthetic construct
MDWCPRARWVDCFF

SEQ ID NO: 1532 - protein, 14 aa, synthetic construct
MDWCPREAWVDCFF

SEQ ID NO: 1533 - protein, 14 aa, synthetic construct
MDWCPRERAVDCFF

SEQ ID NO: 1534 - protein, 14 aa, synthetic construct
MDWCPRERWADCFF

SEQ ID NO: 1535 - protein, 14 aa, synthetic construct
MDWCPRERWVACFF

SEQ ID NO: 1536 - protein, 14 aa, synthetic construct
MDWCPRERWVDCAF

SEQ ID NO: 1537 - protein, 14 aa, synthetic construct
MDWCPRERWVDCFA

SEQ ID NO: 1538 - protein, 14 aa, synthetic construct
MDWCPIDLWNECFF

SEQ ID NO: 1539 - protein, 14 aa, synthetic construct
MDWCPIHLWHVCFN

SEQ ID NO: 1540 - protein, 14 aa, synthetic construct
MDWCPIYLWSECFN

SEQ ID NO: 1541 - protein, 14 aa, synthetic construct
MNWCPKDIWYLCFN

SEQ ID NO: 1542 - protein, 14 aa, synthetic construct
MDWCPLHMWHECFS

SEQ ID NO: 1543 - protein, 14 aa, synthetic construct
MDWCPLYLWNECFN

SEQ ID NO: 1544 - protein, 14 aa, synthetic construct
MDWCPRDLWDLCFA

SEQ ID NO: 1545 - protein, 14 aa, synthetic construct
MDWCPRDLWHECFA

SEQ ID NO: 1546 - protein, 14 aa, synthetic construct
MDWCPRDLWHLCFS

SEQ ID NO: 1547 - protein, 14 aa, synthetic construct
MDWCPRDLWSECFF

SEQ ID NO: 1548 - protein, 14 aa, synthetic construct
MDWCPRDMWDECFA

SEQ ID NO: 1549 - protein, 14 aa, synthetic construct
MDWCPRDMWSECFA

SEQ ID NO: 1550 - protein, 14 aa, synthetic construct
MDWCPRDMWSVCFS

SEQ ID NO: 1551 - protein, 14 aa, synthetic construct
MDWCPRFMWDECFN

SEQ ID NO: 1552 - protein, 14 aa, synthetic construct
MDWCPRHMWNYCFA

SEQ ID NO: 1553 - protein, 14 aa, synthetic construct
MDWCPRSLWHECFA

SEQ ID NO: 1554 - protein, 14 aa, synthetic construct
MDWCPRYLWHVCFA

SEQ ID NO: 1555 - protein, 14 aa, synthetic construct
MHWCPVDLWYLCYN

SEQ ID NO: 1556 - protein, 14 aa, synthetic construct
MDWCPVHLWSVCFA

SEQ ID NO: 1557 - protein, 14 aa, synthetic construct
MDWCPRERWVDCFF

SEQ ID NO: 1558 - protein, 14 aa, synthetic construct
MDWCPIDLWNECFF

SEQ ID NO: 1559 - protein, 14 aa, synthetic construct
MDWCPIHLWHVCFN

SEQ ID NO: 1560 - protein, 14 aa, synthetic construct
MDWCPIYLWSECFN

SEQ ID NO: 1561 - protein, 14 aa, synthetic construct
MNWCPKDIWYLCFN

SEQ ID NO: 1562 - protein, 14 aa, synthetic construct
MDWCPLHMWHECFS

SEQ ID NO: 1563 - protein, 14 aa, synthetic construct
MDWCPLYLWNECFN

SEQ ID NO: 1564 - protein, 14 aa, synthetic construct
MDWCPRDLWDLCFA

SEQ ID NO: 1565 - protein, 14 aa, synthetic construct
MDWCPRDLWHECFA

SEQ ID NO: 1566 - protein, 14 aa, synthetic construct
MDWCPRDLWHLCFS

SEQ ID NO: 1567 - protein, 14 aa, synthetic construct
MDWCPRDLWSECFF

SEQ ID NO: 1568 - protein, 14 aa, synthetic construct
MDWCPRDLWVHCFA

SEQ ID NO: 1569 - protein, 14 aa, synthetic construct
MDWCPRDMWDECFA

SEQ ID NO: 1570 - protein, 14 aa, synthetic construct
MDWCPRDMWSECFA

SEQ ID NO: 1571 - protein, 14 aa, synthetic construct
MDWCPRDMWSVCFS

SEQ ID NO: 1572 - protein, 14 aa, synthetic construct
MDWCPRFMWDECFN

SEQ ID NO: 1573 - protein, 14 aa, synthetic construct
MDWCPRHMWNYCFA

SEQ ID NO: 1574 - protein, 14 aa, synthetic construct
MDWCPRSLWHECFA

SEQ ID NO: 1575 - protein, 14 aa, synthetic construct
MDWCPRYLWHVCFA

SEQ ID NO: 1576 - protein, 14 aa, synthetic construct
MHWCPVDLWYLCYN

SEQ ID NO: 1577 - protein, 14 aa, synthetic construct
MDWCPVHLWSVCFA

SEQ ID NO: 1578 - protein, 14 aa, synthetic construct
MDWCPMHLWHQCFN

SEQ ID NO: 1579 - protein, 14 aa, synthetic construct
MDWCPIDMWDQCFN

SEQ ID NO: 1580 - protein, 14 aa, synthetic construct
MAWCPRDKWSECFS

SEQ ID NO: 1581 - protein, 14 aa, synthetic construct
MDWCPRHLWVHCFN

SEQ ID NO: 1582 - protein, 14 aa, synthetic construct
MDWCPRALWHECFY

SEQ ID NO: 1583 - protein, 14 aa, synthetic construct
MDWCPIALWAECFN

SEQ ID NO: 1584 - protein, 14 aa, synthetic construct
MDWCPRPLWHECFS

SEQ ID NO: 1585 - protein, 14 aa, synthetic construct
MHWCPIDLWAECYA

SEQ ID NO: 1586 - protein, 14 aa, synthetic construct
MAWCPVYLWHECFN

SEQ ID NO: 1587 - protein, 14 aa, synthetic construct
IDWCPRYLWDECYN

SEQ ID NO: 1588 - protein, 14 aa, synthetic construct
MSWCPIHLWNECFN

SEQ ID NO: 1589 - protein, 14 aa, synthetic construct
MDWCPPYLWNVCFS

SEQ ID NO: 1590 - protein, 14 aa, synthetic construct
MDWCPMDLWDYCFN

SEQ ID NO: 1591 - protein, 14 aa, synthetic construct
MDWCPINLWDECFS

SEQ ID NO: 1592 - protein, 14 aa, synthetic construct
MDWCPMHLWNKCFN

SEQ ID NO: 1593 - protein, 14 aa, synthetic construct
MNWCPRDMWYQCFN

SEQ ID NO: 1594 - protein, 14 aa, synthetic construct
QDWCPRHMWSFCFH

SEQ ID NO: 1595 - protein, 14 aa, synthetic construct
MHWCPMDQWSNCFN

SEQ ID NO: 1596 - protein, 14 aa, synthetic construct
MDWCPRHRWVDCFY

SEQ ID NO: 1597 - protein, 14 aa, synthetic construct
MHWCPIDRWADCFN

SEQ ID NO: 1598 - protein, 14 aa, synthetic construct
MDWCPRDSWHLCFA

SEQ ID NO: 1599 - protein, 14 aa, synthetic construct
MDWCPRTLWYLCFN

SEQ ID NO: 1600 - protein, 14 aa, synthetic construct
MVSCPTTMWNRCFN

SEQ ID NO: 1601 - protein, 14 aa, synthetic construct
MDWCPSYLWNECFF

SEQ ID NO: 1602 - protein, 14 aa, synthetic construct
MDWCPRALWAECFN

SEQ ID NO: 1603 - protein, 14 aa, synthetic construct
MDWCPMYLWNECFN

SEQ ID NO: 1604 - protein, 14 aa, synthetic construct
MDWCPRYLWNECFY

SEQ ID NO: 1605 - protein, 14 aa, synthetic construct
MNWCPTALWHVCFN

SEQ ID NO: 1606 - protein, 14 aa, synthetic construct
MDWCPMYMWYECFA

SEQ ID NO: 1607 - protein, 14 aa, synthetic construct
MDWCPIHMWADCFA

SEQ ID NO: 1608 - protein, 14 aa, synthetic construct
ITWCPSSMWNRCFI

SEQ ID NO: 1609 - protein, 14 aa, synthetic construct
MDWCPRYLWHECFA

SEQ ID NO: 1610 - protein, 14 aa, synthetic construct
MFWCPTTMWNRCFT

SEQ ID NO: 1611 - protein, 14 aa, synthetic construct
MDWCPRALWHECFN

SEQ ID NO: 1612 - protein, 14 aa, synthetic construct
MDWCPRDMWLFCYN

SEQ ID NO: 1613 - protein, 14 aa, synthetic construct
MDWCPRSHWHVCYN

SEQ ID NO: 1614 - protein, 14 aa, synthetic construct
MDWCPRYLWSDCFA

SEQ ID NO: 1615 - protein, 14 aa, synthetic construct
MDWCPFYLWDECFN

SEQ ID NO: 1616 - protein, 14 aa, synthetic construct
MDWCPRHLWHECFN

SEQ ID NO: 1617 - protein, 14 aa, synthetic construct
MDWCPRDLWHECFS

SEQ ID NO: 1618 - protein, 14 aa, synthetic construct
MDWCPMYLWNECFS

SEQ ID NO: 1619 - protein, 14 aa, synthetic construct
MDWCPRFLWSVCFN

SEQ ID NO: 1620 - protein, 14 aa, synthetic construct
MDWCPRDLWTECFA

SEQ ID NO: 1621 - protein, 14 aa, synthetic construct
MDWCPRFLWDECFN

SEQ ID NO: 1622 - protein, 14 aa, synthetic construct
MDWCPKYLWSVCFF

SEQ ID NO: 1623 - protein, 14 aa, synthetic construct
MDWCPMDLWYQCFN

SEQ ID NO: 1624 - protein, 14 aa, synthetic construct
MDWCPRHLWAECFF

SEQ ID NO: 1625 - protein, 14 aa, synthetic construct
MDWCPKDLWYLCFA

SEQ ID NO: 1626 - protein, 14 aa, synthetic construct
MDWCPIHLWHYCFN

SEQ ID NO: 1627 - protein, 14 aa, synthetic construct
MDWCPRALWNVCFN

SEQ ID NO: 1628 - protein, 14 aa, synthetic construct
MDWCPIDLWHLCFY

SEQ ID NO: 1629 - protein, 14 aa, synthetic construct
MDWCPRDLWFLCYN

SEQ ID NO: 1630 - protein, 14 aa, synthetic construct
MDWCPRHLWHECFF

SEQ ID NO: 1631 - protein, 14 aa, synthetic construct
MDWCPRYLWTVCFS

SEQ ID NO: 1632 - protein, 14 aa, synthetic construct
MDWCPRDLWSLCFY

SEQ ID NO: 1633 - protein, 14 aa, synthetic construct
MDWCPRFLWSECFN

SEQ ID NO: 1634 - protein, 14 aa, synthetic construct
MDWCPRTLWAYCFN

SEQ ID NO: 1635 - protein, 14 aa, synthetic construct
MDWCPKDLWDYCFA

SEQ ID NO: 1636 - protein, 14 aa, synthetic construct
MDWCPKYLWDVCFN

SEQ ID NO: 1637 - protein, 14 aa, synthetic construct
MDWCPRYLWNMCFH

SEQ ID NO: 1638 - protein, 14 aa, synthetic construct
MDWCPRYLWTECFN

SEQ ID NO: 1639 - protein, 14 aa, synthetic construct
MDWCPRSLWHYCFA

SEQ ID NO: 1640 - protein, 14 aa, synthetic construct
MDWCPRYLWAECFY

SEQ ID NO: 1641 - protein, 14 aa, synthetic construct
MDWCPRDLWHECFN

SEQ ID NO: 1642 - protein, 14 aa, synthetic construct
MDWCPRDLWDLCFF

SEQ ID NO: 1643 - protein, 14 aa, synthetic construct
MDWCPRYLWNVCFN

SEQ ID NO: 1644 - protein, 14 aa, synthetic construct
MDWCPIYLWDECFN

SEQ ID NO: 1645 - protein, 14 aa, synthetic construct
MDWCPRDLWAECFN

SEQ ID NO: 1646 - protein, 14 aa, synthetic construct
MDWCPRALWHECFT

SEQ ID NO: 1647 - protein, 14 aa, synthetic construct
MDWCPKNLWHVCFN

SEQ ID NO: 1648 - protein, 14 aa, synthetic construct
MDWCPRYLWDECFN

SEQ ID NO: 1649 - protein, 14 aa, synthetic construct
MDWCPFYLWNECFY

SEQ ID NO: 1650 - protein, 14 aa, synthetic construct
MHWCPRALWDVCYN

SEQ ID NO: 1651 - protein, 14 aa, synthetic construct
MDWCPRDLWNVCFF

SEQ ID NO: 1652 - protein, 14 aa, synthetic construct
MDWCPRYLWFECFA

SEQ ID NO: 1653 - protein, 14 aa, synthetic construct
MDWCPRYLWHECFN

SEQ ID NO: 1654 - protein, 14 aa, synthetic construct
MDWCPRDLWYACFA

SEQ ID NO: 1655 - protein, 14 aa, synthetic construct
MDWCPRYLWFECFS

SEQ ID NO: 1656 - protein, 14 aa, synthetic construct
MDWCPRHLWDECFF

SEQ ID NO: 1657 - protein, 14 aa, synthetic construct
MDWCPRYLWHMCYS

SEQ ID NO: 1658 - protein, 14 aa, synthetic construct
MDWCPRDLWHACFS

SEQ ID NO: 1659 - protein, 14 aa, synthetic construct
MDWCPRDLWHVCFF

SEQ ID NO: 1660 - protein, 14 aa, synthetic construct
MDWCPRDLWDQCYA

SEQ ID NO: 1661 - protein, 14 aa, synthetic construct
MDWCPIHLWNECFA

SEQ ID NO: 1662 - protein, 14 aa, synthetic construct
MDWCPRPLWDMCFF

SEQ ID NO: 1663 - protein, 14 aa, synthetic construct
MDWCPVSLWHVCFY

SEQ ID NO: 1664 - protein, 14 aa, synthetic construct
MDWCPRFLWNECFN

SEQ ID NO: 1665 - protein, 14 aa, synthetic construct
MDWCPRALWNECFA

SEQ ID NO: 1666 - protein, 14 aa, synthetic construct
MDWCPRDLWIECFF

SEQ ID NO: 1667 - protein, 14 aa, synthetic construct
MDWCPSYLWTVCFA

SEQ ID NO: 1668 - protein, 14 aa, synthetic construct
MDWCPRYLWDACFF

SEQ ID NO: 1669 - protein, 14 aa, synthetic construct
MDWCPRSLWIYCFN

SEQ ID NO: 1670 - protein, 14 aa, synthetic construct
MDWCPTYLWFECFN

SEQ ID NO: 1671 - protein, 14 aa, synthetic construct
MDWCPRFLWDECFF

SEQ ID NO: 1672 - protein, 14 aa, synthetic construct
MDWCPSYLWHECFA

SEQ ID NO: 1673 - protein, 14 aa, synthetic construct
MDWCPKFLWHECFS

SEQ ID NO: 1674 - protein, 14 aa, synthetic construct
MHWCPIYLWDECFN

SEQ ID NO: 1675 - protein, 14 aa, synthetic construct
MDWCPRYLWHECFH

SEQ ID NO: 1676 - protein, 14 aa, synthetic construct
MDWCPTNLWHECFA

SEQ ID NO: 1677 - protein, 14 aa, synthetic construct
MDWCPRDLWDVCFA

SEQ ID NO: 1678 - protein, 14 aa, synthetic construct
MDWCPMDLWDVCFN

SEQ ID NO: 1679 - protein, 14 aa, synthetic construct
MDWCPRSLWNVCFF

SEQ ID NO: 1680 - protein, 14 aa, synthetic construct
MDWCPVILWDFCFN

SEQ ID NO: 1681 - protein, 14 aa, synthetic construct
LDWCPLNLWDLCYF

SEQ ID NO: 1682 - protein, 14 aa, synthetic construct
MDWCPRHLWYACFN

SEQ ID NO: 1683 - protein, 14 aa, synthetic construct
MDWCPKHLWIECFA

SEQ ID NO: 1684 - protein, 14 aa, synthetic construct
MDWCPRHLWSECFY

SEQ ID NO: 1685 - protein, 14 aa, synthetic construct
MHWCPRDLWVVCFN

SEQ ID NO: 1686 - protein, 14 aa, synthetic construct
MHWCPEYLWNECFA

SEQ ID NO: 1687 - protein, 14 aa, synthetic construct
MDWCPRDLWAVCFA

SEQ ID NO: 1688 - protein, 14 aa, synthetic construct
MDWCPRHLWNVCFS

SEQ ID NO: 1689 - protein, 14 aa, synthetic construct
MDFCPISLWHECFF

SEQ ID NO: 1690 - protein, 14 aa, synthetic construct
MDWCPKYLWDKCFH

SEQ ID NO: 1691 - protein, 14 aa, synthetic construct
MDWCPRHLWDLCFF

SEQ ID NO: 1692 - protein, 14 aa, synthetic construct
MDWCPRDLWNVCFA

SEQ ID NO: 1693 - protein, 14 aa, synthetic construct
MHWCPLHLWNECYH

SEQ ID NO: 1694 - protein, 14 aa, synthetic construct
MDWCPKHLWHQCFH

SEQ ID NO: 1695 - protein, 14 aa, synthetic construct
MDWCPRSLWSYCFH

SEQ ID NO: 1696 - protein, 14 aa, synthetic construct
MDWCPRYLWTECFF

SEQ ID NO: 1697 - protein, 14 aa, synthetic construct
MAWCPMNLWDQCFF

SEQ ID NO: 1698 - protein, 14 aa, synthetic construct
MHWCPRALWHECFN

SEQ ID NO: 1699 - protein, 14 aa, synthetic construct
MDWCPRHLWDQCFA

SEQ ID NO: 1700 - protein, 14 aa, synthetic construct
MNWCPTDLWHECFN

SEQ ID NO: 1701 - protein, 14 aa, synthetic construct
MFWCPRYLWHECFN

SEQ ID NO: 1702 - protein, 14 aa, synthetic construct
MDWCPKFLWDLCFA

SEQ ID NO: 1703 - protein, 14 aa, synthetic construct
MDWCPFYLWDECFL

SEQ ID NO: 1704 - protein, 14 aa, synthetic construct
MDWCPRHLWDLCFA

SEQ ID NO: 1705 - protein, 14 aa, synthetic construct
MSWCPQDLWHVCFN

SEQ ID NO: 1706 - protein, 14 aa, synthetic construct
MDWCPKDLWHECFN

SEQ ID NO: 1707 - protein, 14 aa, synthetic construct
MDWCPRDLWNVCFN

SEQ ID NO: 1708 - protein, 14 aa, synthetic construct
MNWCPSDLWHLCFN

SEQ ID NO: 1709 - protein, 14 aa, synthetic construct
MNWCPSHLWHMCYF

SEQ ID NO: 1710 - protein, 14 aa, synthetic construct
MDWCPPYLWYECFA

SEQ ID NO: 1711 - protein, 14 aa, synthetic construct
MDWCPMNLWSECFN

SEQ ID NO: 1712 - protein, 14 aa, synthetic construct
MDWCPKHLWNECFN

SEQ ID NO: 1713 - protein, 14 aa, synthetic construct
MDWCPAYLWAECFS

SEQ ID NO: 1714 - protein, 14 aa, synthetic construct
MDWCPSDLWHECFH

SEQ ID NO: 1715 - protein, 14 aa, synthetic construct
MDWCPVSLWDHCFN

SEQ ID NO: 1716 - protein, 14 aa, synthetic construct
LDWCPRDLWHVCFF

SEQ ID NO: 1717 - protein, 14 aa, synthetic construct
MDWCPWILWNECFN

SEQ ID NO: 1718 - protein, 14 aa, synthetic construct
MHWCPRYLWDECFN

SEQ ID NO: 1719 - protein, 14 aa, synthetic construct
MYWCPRDLWDVCFN

SEQ ID NO: 1720 - protein, 14 aa, synthetic construct
MHWCPRSLWNECYF

SEQ ID NO: 1721 - protein, 14 aa, synthetic construct
IDWCPRDLWALCFN

SEQ ID NO: 1722 - protein, 14 aa, synthetic construct
MHWCPINLWNECFS

SEQ ID NO: 1723 - protein, 14 aa, synthetic construct
MERCPRFLWNECFN

SEQ ID NO: 1724 - protein, 14 aa, synthetic construct
QDWCPTYLWHHCFN

SEQ ID NO: 1725 - protein, 14 aa, synthetic construct
IGKLTLCLNADLVI

SEQ ID NO: 1726 - protein, 14 aa, synthetic construct
MDWCPSYLWDQCFF

SEQ ID NO: 1727 - protein, 14 aa, synthetic construct
VDWCPRYLWHVCYN

SEQ ID NO: 1728 - protein, 14 aa, synthetic construct
MDWCPRDMWAECFF

SEQ ID NO: 1729 - protein, 14 aa, synthetic construct
MDWCPRDMWYECFN

SEQ ID NO: 1730 - protein, 14 aa, synthetic construct
DVWCPKYMWSLCFN

SEQ ID NO: 1731 - protein, 14 aa, synthetic construct
MDWCPMDMWVNCFN

SEQ ID NO: 1732 - protein, 14 aa, synthetic construct
MDWCPSDMWHECYA

SEQ ID NO: 1733 - protein, 14 aa, synthetic construct
MDWCPKHMWFMCFN

SEQ ID NO: 1734 - protein, 14 aa, synthetic construct
MDWCPRYMWYQCFS

SEQ ID NO: 1735 - protein, 14 aa, synthetic construct
MDWCPRHMWYECFF

SEQ ID NO: 1736 - protein, 14 aa, synthetic construct
MDWCPRAMWNHCFN

SEQ ID NO: 1737 - protein, 14 aa, synthetic construct
MDWCPRNMWAQCFA

SEQ ID NO: 1738 - protein, 14 aa, synthetic construct
MFWCPFDMWHFCFN

SEQ ID NO: 1739 - protein, 14 aa, synthetic construct
MDWCPRDMWDQCFD

SEQ ID NO: 1740 - protein, 14 aa, synthetic construct
MFWCPMDMWDQCFN

SEQ ID NO: 1741 - protein, 14 aa, synthetic construct
MSWCPRDMWFYCYA

SEQ ID NO: 1742 - protein, 14 aa, synthetic construct
MDWCPRHMWNVCFS

SEQ ID NO: 1743 - protein, 14 aa, synthetic construct
MDWCPTDMWHHCFL

SEQ ID NO: 1744 - protein, 14 aa, synthetic construct
IHWCPINMWDKCYN

SEQ ID NO: 1745 - protein, 14 aa, synthetic construct
MDWCPRAMWHECFY

SEQ ID NO: 1746 - protein, 14 aa, synthetic construct
MDWCPTDMWIVCFA

SEQ ID NO: 1747 - protein, 14 aa, synthetic construct
IDWCPQDMWFYCFN

SEQ ID NO: 1748 - protein, 14 aa, synthetic construct
MDWCPRDMWFECFA

SEQ ID NO: 1749 - protein, 14 aa, synthetic construct
MDWCPRNMWTVCFL

SEQ ID NO: 1750 - protein, 14 aa, synthetic construct
MDWCPRAMWDKCFF

SEQ ID NO: 1751 - protein, 14 aa, synthetic construct
MNWCPSYMWDQCFA

SEQ ID NO: 1752 - protein, 14 aa, synthetic construct
MDWCPTYMWSECFN

SEQ ID NO: 1753 - protein, 14 aa, synthetic construct
MDWCPRYMWNECFN

SEQ ID NO: 1754 - protein, 14 aa, synthetic construct
MDWCPMNMWYQCFN

SEQ ID NO: 1755 - protein, 14 aa, synthetic construct
MDWCPWDMWDKCFN

SEQ ID NO: 1756 - protein, 14 aa, synthetic construct
TFGCPTTMWNRCFA

SEQ ID NO: 1757 - protein, 14 aa, synthetic construct
NYWCPSSMWNRCLH

SEQ ID NO: 1758 - protein, 14 aa, synthetic construct
FDFCPTTMWTYCQH

SEQ ID NO: 1759 - protein, 14 aa, synthetic construct
TTWCPTSMWLHCFD

SEQ ID NO: 1760 - protein, 14 aa, synthetic construct
MDWCPRDQWHNCFN

SEQ ID NO: 1761 - protein, 14 aa, synthetic construct
MDWCPRDRWVDCFF

SEQ ID NO: 1762 - protein, 14 aa, synthetic construct
MDWCPKDRWNDCYF

SEQ ID NO: 1763 - protein, 14 aa, synthetic construct
MDWCPRDRWADCFF

SEQ ID NO: 1764 - protein, 14 aa, synthetic construct
MDWCPRDRWIDCFN

SEQ ID NO: 1765 - protein, 14 aa, synthetic construct
MDWCPRDRWSDCFN

SEQ ID NO: 1766 - protein, 14 aa, synthetic construct
ITWCHVISGLECWN

SEQ ID NO: 1767 - protein, 14 aa, synthetic construct
VPWCQIISGLECLT

SEQ ID NO: 1768 - protein, 14 aa, synthetic construct
APWCQIISGLECLT

SEQ ID NO: 1769 - protein, 14 aa, synthetic construct
VPWCLIISGLDCLN

SEQ ID NO: 1770 - protein, 14 aa, synthetic construct
MDWCARFVGYGCLD

SEQ ID NO: 1771 - protein, 14 aa, synthetic construct
MTWCPTSFWNRCLD

SEQ ID NO: 1772 - protein, 14 aa, synthetic construct
MDWCPRALWFECFF

SEQ ID NO: 1773 - protein, 14 aa, synthetic construct
MDWCPRYLWHECFS

SEQ ID NO: 1774 - protein, 14 aa, synthetic construct
MDWCPRDLWNLCFF

SEQ ID NO: 1775 - protein, 14 aa, synthetic construct
MDWCPSYLWHECFF

SEQ ID NO: 1776 - protein, 14 aa, synthetic construct
MDWCPPYLWSECFA

SEQ ID NO: 1777 - protein, 14 aa, synthetic construct
MDWCPRYLWHVCFN

SEQ ID NO: 1778 - protein, 14 aa, synthetic construct
MDWCPRTLWHVCFN

SEQ ID NO: 1779 - protein, 14 aa, synthetic construct
MDWCPRHLWHECYS

SEQ ID NO: 1780 - protein, 14 aa, synthetic construct
MDWCPKHLWTECFA

SEQ ID NO: 1781 - protein, 14 aa, synthetic construct
MDWCPRHLWYECFN

SEQ ID NO: 1782 - protein, 14 aa, synthetic construct
MDWCPRYLWHECFD

SEQ ID NO: 1783 - protein, 14 aa, synthetic construct
MDWCPRNLWHLCFA

SEQ ID NO: 1784 - protein, 14 aa, synthetic construct
MDWCPKHLWNKCFN

SEQ ID NO: 1785 - protein, 14 aa, synthetic construct
MDWCPRFMWAECFN

SEQ ID NO: 1786 - protein, 14 aa, synthetic construct
MDWCPRNMWHHCFD

SEQ ID NO: 1787 - protein, 14 aa, synthetic construct
MDWCPSDMWAHCYN

SEQ ID NO: 1788 - protein, 14 aa, synthetic construct
MDWCPKVMWHYCFA

SEQ ID NO: 1789 - protein, 14 aa, synthetic construct
MDWCPRFMWSECFS

SEQ ID NO: 1790 - protein, 14 aa, synthetic construct
MDWCPRHMWINCFA

SEQ ID NO: 1791 - protein, 14 aa, synthetic construct
MVGCATSMWNRCLT

SEQ ID NO: 1792 - protein, 14 aa, synthetic construct
MDWCPRYLWSECFA

SEQ ID NO: 1793 - protein, 14 aa, synthetic construct
MDWCPRHLWSVCFN

SEQ ID NO: 1794 - protein, 14 aa, synthetic construct
MDWCPFDLWHVCYN

SEQ ID NO: 1795 - protein, 14 aa, synthetic construct
MDWCPRFLWHECFN

SEQ ID NO: 1796 - protein, 14 aa, synthetic construct
MDWCPRSLWHVCFN

SEQ ID NO: 1797 - protein, 14 aa, synthetic construct
MDWCPRNLWHACFN

SEQ ID NO: 1798 - protein, 14 aa, synthetic construct
MDWCPVFMWNECFN

SEQ ID NO: 1799 - protein, 14 aa, synthetic construct
MDWCPMFMWHECFN

SEQ ID NO: 1800 - protein, 14 aa, synthetic construct
MYWCATSMWNRCFV

SEQ ID NO: 1801 - protein, 14 aa, synthetic construct
MDWCPRHMWHECFA

SEQ ID NO: 1802 - protein, 14 aa, synthetic construct
MDWCPRHLWHVCFN

SEQ ID NO: 1803 - protein, 14 aa, synthetic construct
MDWCPRFMWDLCFA

SEQ ID NO: 1804 - protein, 14 aa, synthetic construct
VTSCPTTMWNRCFS

SEQ ID NO: 1805 - protein, 14 aa, synthetic construct
MTLCLSVDLVHCWY

SEQ ID NO: 1806 - protein, 14 aa, synthetic construct
DSFCTWSAWQECGR

SEQ ID NO: 1807 - protein, 14 aa, synthetic construct
MDWCPRDFWAFCFF

SEQ ID NO: 1808 - protein, 14 aa, synthetic construct
MDWCPTSFWNRCFH

SEQ ID NO: 1809 - protein, 14 aa, synthetic construct
MVWCMSVGWAVCLN

SEQ ID NO: 1810 - protein, 14 aa, synthetic construct
IDWCPTAGWTYCWF

SEQ ID NO: 1811 - protein, 14 aa, synthetic construct
WVSCLRHHWLECFH

SEQ ID NO: 1812 - protein, 14 aa, synthetic construct
MDWCPRDHWVDCYS

SEQ ID NO: 1813 - protein, 14 aa, synthetic construct
IDWCPKIHWDLCYF

SEQ ID NO: 1814 - protein, 14 aa, synthetic construct
MDWCPRSHWSECFS

SEQ ID NO: 1815 - protein, 14 aa, synthetic construct
MDWCPRSIWYLCFN

SEQ ID NO: 1816 - protein, 14 aa, synthetic construct
MDWCPRYLWAECFN

SEQ ID NO: 1817 - protein, 14 aa, synthetic construct
MDWCPRYLWDYCFA

SEQ ID NO: 1818 - protein, 14 aa, synthetic construct
MDWCPRSLWFLCFN

SEQ ID NO: 1819 - protein, 14 aa, synthetic construct
MDWCPRDLWFACFA

SEQ ID NO: 1820 - protein, 14 aa, synthetic construct
MDWCPRHLWNECFN

SEQ ID NO: 1821 - protein, 14 aa, synthetic construct
MDWCPRFLWHVCFS

SEQ ID NO: 1822 - protein, 14 aa, synthetic construct
MDWCPRDLWAMCFA

SEQ ID NO: 1823 - protein, 14 aa, synthetic construct
MERCPRYLWHMCYS

SEQ ID NO: 1824 - protein, 14 aa, synthetic construct
MDWCPIALWDFCFA

SEQ ID NO: 1825 - protein, 14 aa, synthetic construct
MDWCPRYLWNVCFA

SEQ ID NO: 1826 - protein, 14 aa, synthetic construct
MDWCPRDLWSVCFS

SEQ ID NO: 1827 - protein, 14 aa, synthetic construct
MDWCPRYLWHVCFY

SEQ ID NO: 1828 - protein, 14 aa, synthetic construct
MDWCPRALWDHCFF

SEQ ID NO: 1829 - protein, 14 aa, synthetic construct
MDWCPRHLWFECFN

SEQ ID NO: 1830 - protein, 14 aa, synthetic construct
MDWCPRSLWDYCFA

SEQ ID NO: 1831 - protein, 14 aa, synthetic construct
MDWCPRHLWTECFS

SEQ ID NO: 1832 - protein, 14 aa, synthetic construct
MDWCPLYLWAECFN

SEQ ID NO: 1833 - protein, 14 aa, synthetic construct
MDWCPIYLWAECFN

SEQ ID NO: 1834 - protein, 14 aa, synthetic construct
MDWCPRHLWFECFF

SEQ ID NO: 1835 - protein, 14 aa, synthetic construct
MDWCPRYLWHECFF

SEQ ID NO: 1836 - protein, 14 aa, synthetic construct
MDWCPRYLWHVCFD

SEQ ID NO: 1837 - protein, 14 aa, synthetic construct
MDWCPRYLWTECFS

SEQ ID NO: 1838 - protein, 14 aa, synthetic construct
MDWCPKFLWDECFA

SEQ ID NO: 1839 - protein, 14 aa, synthetic construct
MDWCPRDLWTECFS

SEQ ID NO: 1840 - protein, 14 aa, synthetic construct
MDWCPRHLWNECFA

SEQ ID NO: 1841 - protein, 14 aa, synthetic construct
MDWCPRYLWPVCFH

SEQ ID NO: 1842 - protein, 14 aa, synthetic construct
MDWCPKSLWAECFN

SEQ ID NO: 1843 - protein, 14 aa, synthetic construct
MDWCPMFLWHECFN

SEQ ID NO: 1844 - protein, 14 aa, synthetic construct
MDWCPRDLWDECFN

SEQ ID NO: 1845 - protein, 14 aa, synthetic construct
MDWCPRDLWYQCFN

SEQ ID NO: 1846 - protein, 14 aa, synthetic construct
MDWCPRSLWNYCFN

SEQ ID NO: 1847 - protein, 14 aa, synthetic construct
MDWCPIHLWNECFN

SEQ ID NO: 1848 - protein, 14 aa, synthetic construct
MDWCPTYLWHVCFS

SEQ ID NO: 1849 - protein, 14 aa, synthetic construct
MDWCPRSLWNYCFA

SEQ ID NO: 1850 - protein, 14 aa, synthetic construct
MDWCPRHLWHECFT

SEQ ID NO: 1851 - protein, 14 aa, synthetic construct
MDWCPMFLWDECFN

SEQ ID NO: 1852 - protein, 14 aa, synthetic construct
MSWCPRDLWHLCFF

SEQ ID NO: 1853 - protein, 14 aa, synthetic construct
MDWCPTYLWNECFN

SEQ ID NO: 1854 - protein, 14 aa, synthetic construct
MDWCPRDLWYVCFA

SEQ ID NO: 1855 - protein, 14 aa, synthetic construct
MDWCPRHLWIECFN

SEQ ID NO: 1856 - protein, 14 aa, synthetic construct
MDWCPTYLWNVCFA

SEQ ID NO: 1857 - protein, 14 aa, synthetic construct
MDWCPRHLWYECFS

SEQ ID NO: 1858 - protein, 14 aa, synthetic construct
MDWCPAYLWDECFA

SEQ ID NO: 1859 - protein, 14 aa, synthetic construct
MFWCPITLWNECFN

SEQ ID NO: 1860 - protein, 14 aa, synthetic construct
MHWCPRDLWHVCFN

SEQ ID NO: 1861 - protein, 14 aa, synthetic construct
MDWCPRALWDHCFN

SEQ ID NO: 1862 - protein, 14 aa, synthetic construct
MDWCPRALWNVCFA

SEQ ID NO: 1863 - protein, 14 aa, synthetic construct
MDWCPRFLWDVCFN

SEQ ID NO: 1864 - protein, 14 aa, synthetic construct
MDWCPRHLWDECFY

SEQ ID NO: 1865 - protein, 14 aa, synthetic construct
IDWCPRALWDACLA

SEQ ID NO: 1866 - protein, 14 aa, synthetic construct
MDWCPTDLWHECFA

SEQ ID NO: 1867 - protein, 14 aa, synthetic construct
MDWCPRYLWDECFS

SEQ ID NO: 1868 - protein, 14 aa, synthetic construct
MDWCPRFLWDYCFA

SEQ ID NO: 1869 - protein, 14 aa, synthetic construct
MDWCPRDLWNWCFN

SEQ ID NO: 1870 - protein, 14 aa, synthetic construct
MDWCPKPLWHVCFA

SEQ ID NO: 1871 - protein, 14 aa, synthetic construct
MDWCPRFLWNECFY

SEQ ID NO: 1872 - protein, 14 aa, synthetic construct
MDWCPRTLWDQCFF

SEQ ID NO: 1873 - protein, 14 aa, synthetic construct
MSWCPIDLWSECFA

SEQ ID NO: 1874 - protein, 14 aa, synthetic construct
MDWCPRHLWDECFN

SEQ ID NO: 1875 - protein, 14 aa, synthetic construct
MDWCPRNLWHECFA

SEQ ID NO: 1876 - protein, 14 aa, synthetic construct
MDWCPRDLWTQCFF

SEQ ID NO: 1877 - protein, 14 aa, synthetic construct
MDWCPRHLWVHCFS

SEQ ID NO: 1878 - protein, 14 aa, synthetic construct
MDFCPRFLWHECFN

SEQ ID NO: 1879 - protein, 14 aa, synthetic construct
MDWCPRHLWHACFS

SEQ ID NO: 1880 - protein, 14 aa, synthetic construct
MDWCPLFLWDQCFN

SEQ ID NO: 1881 - protein, 14 aa, synthetic construct
MAWCPWYLWDECFN

SEQ ID NO: 1882 - protein, 14 aa, synthetic construct
LDWCPRHLWALCFN

SEQ ID NO: 1883 - protein, 14 aa, synthetic construct
MDWCPWFLWNECFN

SEQ ID NO: 1884 - protein, 14 aa, synthetic construct
MDWCPMNLWHECFA

SEQ ID NO: 1885 - protein, 14 aa, synthetic construct
MDWCPIHLWYECFN

SEQ ID NO: 1886 - protein, 14 aa, synthetic construct
IDWCPLHLWHECYH

SEQ ID NO: 1887 - protein, 14 aa, synthetic construct
MDWCPRYLWLECFN

SEQ ID NO: 1888 - protein, 14 aa, synthetic construct
MDWCPMYLWDECFF

SEQ ID NO: 1889 - protein, 14 aa, synthetic construct
MDWCPRLLWHECFN

SEQ ID NO: 1890 - protein, 14 aa, synthetic construct
MDWCPPHLWHECFF

SEQ ID NO: 1891 - protein, 14 aa, synthetic construct
MDWCPRPLWHECFA

SEQ ID NO: 1892 - protein, 14 aa, synthetic construct
MDWCPMFLWHECFS

SEQ ID NO: 1893 - protein, 14 aa, synthetic construct
MHWCPRHLWSECFN

SEQ ID NO: 1894 - protein, 14 aa, synthetic construct
MDWCPRILWHECFS

SEQ ID NO: 1895 - protein, 14 aa, synthetic construct
MNWCPMHLWAECFN

SEQ ID NO: 1896 - protein, 14 aa, synthetic construct
MDWCPRSLWAQCFY

SEQ ID NO: 1897 - protein, 14 aa, synthetic construct
MDWCPSYLWPVCFN

SEQ ID NO: 1898 - protein, 14 aa, synthetic construct
MHWCPLYLWDECFY

SEQ ID NO: 1899 - protein, 14 aa, synthetic construct
MDWCPSFLWYECFN

SEQ ID NO: 1900 - protein, 14 aa, synthetic construct
MSWCPPYLWTVCYN

SEQ ID NO: 1901 - protein, 14 aa, synthetic construct
MHWCPRDLWYECFA

SEQ ID NO: 1902 - protein, 14 aa, synthetic construct
MTWCPAYLWHECFN

SEQ ID NO: 1903 - protein, 14 aa, synthetic construct
MAWCPRYLWAECFF

SEQ ID NO: 1904 - protein, 14 aa, synthetic construct
MDWCPRYLWVDCFA

SEQ ID NO: 1905 - protein, 14 aa, synthetic construct
MDWCPRILWSDCFN

SEQ ID NO: 1906 - protein, 14 aa, synthetic construct
MAWCPLDLWDKCFY

SEQ ID NO: 1907 - protein, 14 aa, synthetic construct
MNWCPRALWHECFL

SEQ ID NO: 1908 - protein, 14 aa, synthetic construct
MDWCPRHLWTYCFH

SEQ ID NO: 1909 - protein, 14 aa, synthetic construct
MDWCPFDLWLECFN

SEQ ID NO: 1910 - protein, 14 aa, synthetic construct
MHWCPLHLWNECFA

SEQ ID NO: 1911 - protein, 14 aa, synthetic construct
MDWCPRNLWAECFS

SEQ ID NO: 1912 - protein, 14 aa, synthetic construct
MDYCPSYLWHECFA

SEQ ID NO: 1913 - protein, 14 aa, synthetic construct
MAWCPRILWHQCFN

SEQ ID NO: 1914 - protein, 14 aa, synthetic construct
ITWCPTSLWNRCLV

SEQ ID NO: 1915 - protein, 14 aa, synthetic construct
LAGCQRDLATVCVI

SEQ ID NO: 1916 - protein, 14 aa, synthetic construct
IMWCPTSLWNRCVT

SEQ ID NO: 1917 - protein, 14 aa, synthetic construct
ILRCQMNLQDECLN

SEQ ID NO: 1918 - protein, 14 aa, synthetic construct
NHWCPTTLWNRCVA

SEQ ID NO: 1919 - protein, 14 aa, synthetic construct
MDWCPRHLWLECFN

SEQ ID NO: 1920 - protein, 14 aa, synthetic construct
MDWCPRFMWNFCFF

SEQ ID NO: 1921 - protein, 14 aa, synthetic construct
MDWCPSDMWANCFF

SEQ ID NO: 1922 - protein, 14 aa, synthetic construct
IDWCPMHMWDFCYN

SEQ ID NO: 1923 - protein, 14 aa, synthetic construct
MDWCPFDMWADCFF

SEQ ID NO: 1924 - protein, 14 aa, synthetic construct
LHWCPTSMWTYCYY

SEQ ID NO: 1925 - protein, 14 aa, synthetic construct
MDWCPRDMWFECFN

SEQ ID NO: 1926 - protein, 14 aa, synthetic construct
MDWCPRYMWSDCFF

SEQ ID NO: 1927 - protein, 14 aa, synthetic construct
MDWCPKDMWAECFN

SEQ ID NO: 1928 - protein, 14 aa, synthetic construct
TDWCPRDMWYLCFN

SEQ ID NO: 1929 - protein, 14 aa, synthetic construct
MDWCPRAMWDYCFY

SEQ ID NO: 1930 - protein, 14 aa, synthetic construct
MDWCPRNMWNECFF

SEQ ID NO: 1931 - protein, 14 aa, synthetic construct
MDWCPRSMWDSCFN

SEQ ID NO: 1932 - protein, 14 aa, synthetic construct
MHWCPTYMWSECFA

SEQ ID NO: 1933 - protein, 14 aa, synthetic construct
MDWCPLDMWVLCFA

SEQ ID NO: 1934 - protein, 14 aa, synthetic construct
MDWCPRHMWHECFH

SEQ ID NO: 1935 - protein, 14 aa, synthetic construct
MSWCPWDMWNECFA

SEQ ID NO: 1936 - protein, 14 aa, synthetic construct
MDWCPRDMWTSCFN

SEQ ID NO: 1937 - protein, 14 aa, synthetic construct
MDWCPMSMWAFCFD

SEQ ID NO: 1938 - protein, 14 aa, synthetic construct
MNWCPIDMWTECFN

SEQ ID NO: 1939 - protein, 14 aa, synthetic construct
MNWCPIHMWNQCFA

SEQ ID NO: 1940 - protein, 14 aa, synthetic construct
MFWCPKDMWAECFA

SEQ ID NO: 1941 - protein, 14 aa, synthetic construct
LHWCPITMWTYCYY

SEQ ID NO: 1942 - protein, 14 aa, synthetic construct
IDWCPRYMWHECFF

SEQ ID NO: 1943 - protein, 14 aa, synthetic construct
MSWCPRFMWHECFN

SEQ ID NO: 1944 - protein, 14 aa, synthetic construct
QHWCPRDMWNDCYA

SEQ ID NO: 1945 - protein, 14 aa, synthetic construct
MDWCPSDMWSNCFN

SEQ ID NO: 1946 - protein, 14 aa, synthetic construct
LYWCPRDMWAYCYS

SEQ ID NO: 1947 - protein, 14 aa, synthetic construct
MDWCPMYMWHKCFH

SEQ ID NO: 1948 - protein, 14 aa, synthetic construct
MDWCPSNMWNECFF

SEQ ID NO: 1949 - protein, 14 aa, synthetic construct
IYWCPTAMWNRCSA

SEQ ID NO: 1950 - protein, 14 aa, synthetic construct
MYWCPKYMWSECFA

SEQ ID NO: 1951 - protein, 14 aa, synthetic construct
VDWCPAHMWNECYN

SEQ ID NO: 1952 - protein, 14 aa, synthetic construct
MFWCPSTMWNRCFD

SEQ ID NO: 1953 - protein, 14 aa, synthetic construct
TIFCPSTMWNRCWT

SEQ ID NO: 1954 - protein, 14 aa, synthetic construct
MYWCPINMWDYCYA

SEQ ID NO: 1955 - protein, 14 aa, synthetic construct
INLCPTPMWNRCWL

SEQ ID NO: 1956 - protein, 14 aa, synthetic construct
ITQCPSTMWNRCSV

SEQ ID NO: 1957 - protein, 14 aa, synthetic construct
MDLCPTAMWNRCFY

SEQ ID NO: 1958 - protein, 14 aa, synthetic construct
MFLCPSAMWNRCFY

SEQ ID NO: 1959 - protein, 14 aa, synthetic construct
VILCPTTMWNRCFH

SEQ ID NO: 1960 - protein, 14 aa, synthetic construct
MNWCPSTMWNRCLT

SEQ ID NO: 1961 - protein, 14 aa, synthetic construct
IHLCHWVPWIKCSH

SEQ ID NO: 1962 - protein, 14 aa, synthetic construct
MAWCPADQWHECFN

SEQ ID NO: 1963 - protein, 14 aa, synthetic construct
IDWCPIIQGLPCFA

SEQ ID NO: 1964 - protein, 14 aa, synthetic construct
MAWCPWAQFDECLA

SEQ ID NO: 1965 - protein, 14 aa, synthetic construct
IVWCPTTQWNRCAT

SEQ ID NO: 1966 - protein, 14 aa, synthetic construct
MDWCPRDRWVDCYA

SEQ ID NO: 1967 - protein, 14 aa, synthetic construct
MDWCPRDRWADCFN

SEQ ID NO: 1968 - protein, 14 aa, synthetic construct
MDWCPVDRWADCFN

SEQ ID NO: 1969 - protein, 14 aa, synthetic construct
MDWCPMSRWAFCFD

SEQ ID NO: 1970 - protein, 14 aa, synthetic construct
MDWCPRDRWDVCFA

SEQ ID NO: 1971 - protein, 14 aa, synthetic construct
MDWCPRDRWVDCFN

SEQ ID NO: 1972 - protein, 14 aa, synthetic construct
MDWCPRDRWDDCFF

SEQ ID NO: 1973 - protein, 14 aa, synthetic construct
IYWCPIDRWNDCYN

SEQ ID NO: 1974 - protein, 14 aa, synthetic construct
MDWCPMTRWNDCYF

SEQ ID NO: 1975 - protein, 14 aa, synthetic construct
VNQCTRYRWAECLN

SEQ ID NO: 1976 - protein, 14 aa, synthetic construct
MDWCPRARWHDCFF

SEQ ID NO: 1977 - protein, 14 aa, synthetic construct
MDWCPRDRWDDCFN

SEQ ID NO: 1978 - protein, 14 aa, synthetic construct
MDWCPRDRWDVCYY

SEQ ID NO: 1979 - protein, 14 aa, synthetic construct
MAWCPWASFDECLA

SEQ ID NO: 1980 - protein, 14 aa, synthetic construct
MVDCPLISFDECLA

SEQ ID NO: 1981 - protein, 14 aa, synthetic construct
EDWCPTDVWPYCFS

SEQ ID NO: 1982 - protein, 14 aa, synthetic construct
MDWCPRFWWHECYA

SEQ ID NO: 1983 - protein, 14 aa, synthetic construct
MDWCPRDWWHMCFN

SEQ ID NO: 1984 - protein, 14 aa, synthetic construct
MDWCPSDYWYVCFA

SEQ ID NO: 1985-1992 - skipped (8 entries)

SEQ ID NO: 1993 - protein, 9 aa, synthetic construct
  VARIANT 1..9: note = This sequence may encompass 1-3 GGS repeating units
GGSGGSGGS

SEQ ID NO: 1994 - protein, 5 aa, synthetic construct
GSGGS

SEQ ID NO: 1995 - protein, 4 aa, synthetic construct
GGGS

SEQ ID NO: 1996 - protein, 5 aa, synthetic construct
GGGGS

SEQ ID NO: 1997 - protein, 6 aa, synthetic construct
GSSGGS

SEQ ID NO: 1998 - protein, 9 aa, synthetic construct
GGGGSGGGS